(19) United States
(12) Patent Application Publication
(10) Pub. No.: US 2017/0296623 A1
(43) Pub. Date: Oct. 19, 2017

(54) INHIBITORY CHIMERIC ANTIGEN RECEPTOR (iCAR OR N-CAR) EXPRESSING NON-T CELL TRANSDUCTION DOMAIN

(71) Applicant: CELLECTIS, Paris (FR)

(72) Inventors: Alexandre JUILLERAT, New York, NY (US); Philippe DUCHATEAU, Draveil (FR); Laurent POIROT, Paris (FR)

(21) Appl. No.: 15/532,430

(22) PCT Filed: Dec. 17, 2015
(86) PCT No.: PCT/EP2015/080376

§ 371 Date: Jun. 1, 2017

(30) Foreign Application Priority Data
Dec. 17, 2014 (DK) PA201470797
Aug. 11, 2015 (DK) PA201570518

(51) Int. Cl. A61K 38/17; C07K 14/47; C07K 14/705; C07K 14/525; A61K 38/00; C07K 14/00

(52) U.S. Cl. CPC A61K 38/17; C07K 14/70596; C07K 14/525; C07K 14/4748; C07K 14/00; A61K 38/00

(57) ABSTRACT

The invention relates to negative T-cell signal inducing chimeric antigen receptor (N-CAR or i-CAR) and to T-cells comprising such N-CAR as well as a positive T-cell signal inducing CAR (P-CAR) as well as their use in therapy.

### FIELD OF THE INVENTION

[0001] The invention relates to negative T-cell signal inducing chimeric antigen receptor (N-CAR or i-CAR) and to T-cells comprising such N-CAR as well as a positive T-cell signal inducing CAR (P-CAR) as well as their use in therapy. In particular, the present invention relates to an immune cell engineered to express at least one N-CAR and at least one P-CAR, wherein the P-CAR binds to a first antigen and activates the immunoresponsive cell (i.e. cytotoxicity) whereas the N-CAR binds to a second antigen and inhibits the immunoresponsive cell (i.e. cytotoxicity) through the signaling of a sequence from a TRAIL receptor or a CD200R1 receptor.

[0002] The invention also relates to negative T-cell signal inducing chimeric antigen receptor (N-CAR or i-CAR) and to T-cells comprising such N-CAR as well as a positive T-cell signal inducing CAR (P-CAR) as well as their use in therapy. In particular, the present invention relates to an immune cell engineered to express at least one N-CAR and at least one P-CAR, wherein the P-CAR binds to a first antigen and activates the immunoresponsive cell (i.e. cytotoxicity) whereas the N-CAR binds to a second antigen and inhibits the immunoresponsive cell (i.e. cytotoxicity) through the signaling of a sequence usually expressed in non T cells, provided that said sequence is not an ITSM preferably not a sequence selected in a group consisting of SEQ ID NO:13 (human SIGL8), SEQ ID NO:14 (human SIGL7), SEQ ID NO:17 (human SIGL5), SEQ ID NO:20 (human SIGL9), SEQ ID NO: 21 (human SIGL6), SEQ ID NO:22 (human CD33), SEQ ID NO:26 (human SIG12), SEQ ID NO:31 (human SIG11), SEQ ID NO:32 (human SIG10) and SEQ ID NO:19 (human PECA1).

[0003] or

[0004] provided that said sequence does not comprise a sequence selected in a group consisting of SEQ ID NO:13 (human SIGL8), SEQ ID NO:14 (human SIGL7), SEQ ID NO:17 (human SIGL5), SEQ ID NO:20 (human SIGL9), SEQ ID NO: 21 (human SIGL6), SEQ ID NO:22 (human CD33), SEQ ID NO:26 (human SIG12), SEQ ID NO:31 (human SIG11), SEQ ID NO:32 (human SIG10) and SEQ ID NO:19 (human PECA1).

[0005] This system of “NOT gates” is particularly useful in immunotherapy in order to prevent cytotoxicity towards “off-target” healthy or immune cells.

### INTRODUCTION

[0006] Adoptive immunotherapy, which involves the transfer of autologous antigen-specific T cells generated ex vivo, is a promising strategy to treat viral infections and cancer. The T cells used for adoptive immunotherapy can be generated either by expansion of antigen-specific T cells or redirection of T cells through genetic engineering (Park, Rosenberg et al. 2011, Trends Biotechnol 29(11):550-7). Transfer of viral antigen specific T cells is a well-established procedure used for the treatment of transplant associated viral infections and rare viral-related malignancies. Similarly, isolation and transfer of tumor specific T cells has been shown to be successful in treating melanoma.

[0007] Novel specificities in T cells have been successfully generated through the genetic transfer of transgenic T cell receptors or chimeric antigen receptors (CARs) (Jena, Dotti et al. 2010, Blood 116(7):1035-44). CARs are synthetic receptors consisting of a targeting moiety that is associated with one or more signaling domains in a single fusion molecule. In general, the binding moiety of a CAR consists of an antigen-binding domain of a single-chain antibody (scFv), comprising the light and heavy variable fragments of a monoclonal antibody joined by a flexible linker. Binding moieties based on receptor or ligand domains have also been used successfully. The signaling domains for first generation CARs are derived from the cytoplasmic region of the ζCD3zeta or the Fc receptor gamma chains. First generation CARs have been shown to successfully redirect T cell cytotoxicity, however, they failed to provide prolonged expansion and anti-tumor activity in vivo. Signaling domains from co-stimulatory molecules including CD28, OX-40 (CD134), ICOS and 4-1BB (CD137) have been added alone (second generation) or in combination (third generation) to enhance survival and increase proliferation of CAR modified T cells. CARs have successfully allowed T cells to be redirected against antigens expressed at the surface of tumor cells from various malignancies including lymphomas and solid tumors (Jena, Dotti et al. 2010, Blood 116(7):1035-44).

[0008] However, despite their unprecedent efficacy for tumor eradication in vivo, CAR T cells can promote acute adverse events after being transferred into patients. Among the well documented adverse events is Graft versus host disease (GvHD), on-target off-tumor activity or aberrant lymphoproliferative capacity due to vector derived insertional mutagenesis. Therefore, there is a need to develop cell specific depletion systems to prevent such deleterious events to occur in vivo.

[0009] Recently, inhibitory chimeric antigen receptors (N-CARs) were designed having as objective to put the brakes on T cell function upon encountering off-target cells (Fedorov, V. D., Themeli, M., Sadelain, M, 2013, Sci Transl Med 5 (215). In this paper, the authors designed CLTA-4- and PD-1-based N-CARs which could selectively limit cytokine secretion, cytotoxicity, and proliferation induced through the endogenous T cell receptor or an activating chimeric receptor. They have shown that the initial effect of the N-CAR is temporary, thus enabling T cells to function upon a subsequent encounter with the antigen recognized by their activating receptor.

[0010] Proteins containing Immunoreceptor tyrosine-based inhibitory motif (ITIM), immunoreceptor tyrosine-based switch motif (ITSM) and SH2-binding motif are, as non-limiting example, known to play a major role in the inhibition, control and modulation of several signaling pathways in T-cells (e.g. TCR) (Barrow A and Trowsdale J, 2006, Eur J Immunol 36 (7): 1646-53, Sharpe H and Freeman G, 2002, Nature Reviews Immunology, (2) 116-126).

[0011] However, when the engineered iCAR or N-CAR T-cells contain a transduction domain from T-cell, it may occur an interference or protein interaction with the transduction domain from wild-type T-cells. In order to circumvent this problem, the inventors have sought engineered inhibitory chimeric antigen receptor (N-CAR) based on non-naturally expressed intracellular domains in T-cell and/or intracellular domain from TRAIL receptors and/or CD200 receptor 1. This N-CAR can be used in “logic NOT gates” systems which are composed of a positive signaling CAR (P-CAR) and an inhibitory Gate receptor (iCAR or N-CAR).

### SUMMARY

[0012] The present invention is drawn to apply biology principles such as logic “NOT gate” to immune cell technology in order for the engineered immune cells, in particular T-cells, to be inhibited in case off-tumor targets (healthy cells). In particular, the present invention relates to an inhibitory chimeric antigen receptor (iCAR or N-CAR) which contains an intracellular domain from a receptor involved in transduction signal which is not significantly expressed in natural T-cell and/or from a TRAIL receptor and/or the CD200 receptor. The preferred intracellular domains of the invention have at least 80% identity with the polypeptides of SEQ ID NO: 1 to 36. More preferably an intracellular domain of the CAR P of the invention comprises a sequence selected from the group consisting of SEQ ID NO: 1 to 36.

[0013] Another aspect of the invention is the engineered immune cell such as T-cell which expressed both said N-CAR and a positive CAR (P-CAR); their respective extracellular binding domains targeting an off tumor cell (healthy cell) and a tumoral cell.

[0014] The present invention also relates to a method of engineering of such N-CAR and isolated immune cell, polynucleotides and vectors encoding said CARs, as well as therapeutic treatment using such engineered immune cell.

### BRIEF DESCRIPTION OF DRAWINGS

[0015] FIG. 1: Schematic representation of the architectures (versions V1 to V6, preferably V1, V3 and V5) for the different single-chain car chimeric antigen receptor (scCAR) of the invention.

[0016] FIG. 2: Schematic representation of the design of inhibitory Gate receptors (N-CAR): the native signaling modulation receptor is engineered in order to replace the native extracellular topological domain by an extracellular binding domain able to bind specifically to an antigen or cell surface marker of an “off-target” healthy cell.

[0017] FIG. 3: P-CAR (P is CD20) driven activation (measured by expression of CD69) of transduced T cells mediated through target cells expressing the CD20 antigen. CD69 is an appropriate marker for measuring T cell activation.

[0018] FIG. 4: FIG. 4 shows Ratio of % of target cells antigen P-CAR-high/antigen N-CAR-high and antigen P-CAR-high/antigen N-CAR-low after a co-incubation of 6 h with engineered primary T-cells (three ratio of target/effectors are used: 1/1, 1/3 and 1/10).

### DETAILED DESCRIPTION

| Abreviations | Designation |
|---|---|
| N-CAR Or iCAR | negative chimeric antigen receptor |
| P-CAR | positive chimeric antigen receptor |
| TRAIL | tumor-necrosis-factor related apoptosis inducing ligand |
| CDR | complementarity determining regions |
| scFv | single chain antibody fragment |
| KIR2DL2 CD158B1 NKAT6 | Killer cell immunoglobulin-like receptor 2DL2 (CD158 antigen-like |
| | family member B1) (MHC class I NK cell receptor) (Natural killer- |
| | associated transcript 6) (NKAT-6) (p58 natural killer cell receptor clone |
| | CL-43) (p58 NK receptor CL-43) (CD antigen CD158b1) |
| KIR2DL1 CD158A NKAT1 | Killer cell immunoglobulin-like receptor 2DL1 (CD158 antigen-like |
| | family member A) (MHC class I NK cell receptor) (Natural killer- |
| | associated transcript 1) (NKAT-1) (p58 natural killer cell receptor |
| | clones CL-42/47.11) (p58 NK receptor CL-42/47.11) (p58.1 MHC class-I- |
| | specific NK receptor) (CD antigen CD158a) |
| FCGR2B CD32 FCG2 IGFR2 | Low affinity immunoglobulin gamma Fc region receptor II-b (IgG Fc |
| | receptor II-b) (CDw32) (Fc-gamma RII-b) (Fc-gamma-RIIb) (FcRII-b) (CD |
| | antigen CD32) |
| KIR2DL3 CD158B2 KIRCL23 | Killer cell immunoglobulin-like receptor 2DL3 (CD158 antigen-like |
| NKAT2 | family member B2) (KIR-023GB) (Killer inhibitory receptor cl 2-3) (MHC |
| | class I NK cell receptor) (NKAT2a) (NKAT2b) (Natural killer-associated |
| | transcript 2) (NKAT-2) (p58 natural killer cell receptor clone CL-6) (p58 |
| | NK receptor CL-6) (p58.2 MHC class-I-specific NK receptor) (CD antigen |
| | CD158b2) |
| KIR3DL2 CD158K NKAT4 | Killer cell immunoglobulin-like receptor 3DL2 (CD158 antigen-like |
| | family member K) (MHC class I NK cell receptor) (Natural killer- |
| | associated transcript 4) (NKAT-4) (p70 natural killer cell receptor clone |
| | CL-5) (p70 NK receptor CL-5) (CD antigen CD158k) |
| KIR2DL4 CD158D KIR103AS | Killer cell immunoglobulin-like receptor 2DL4 (CD158 antigen-like |
| | family member D) (G9P) (Killer cell inhibitory receptor 103AS) (KIR- |
| | 103AS) (MHC class I NK cell receptor KIR103AS) (CD antigen CD158d) |
| KIR3DL1 CD158E NKAT3 | Killer cell immunoglobulin-like receptor 3DL1 (CD158 antigen-like |
| NKB1 | family member E) (HLA-BW4-specific inhibitory NK cell receptor) (MHC |
| | class I NK cell receptor) (Natural killer-associated transcript 3) (NKAT- |
| | 3) (p70 natural killer cell receptor clones CL-2/CL-11) (p70 NK receptor |
| | CL-2/CL-11) (CD antigen CD158e) |
| KIR2DL5A CD158F | Killer cell immunoglobulin-like receptor 2DL5A (CD antigen CD158f1) |
| CD158F1 KIR2DL5 | |
| MILR1 C17orf60 MCA32 | Allergin-1 (Allergy inhibitory receptor 1) (Mast cell antigen 32) (MCA- |
| | 32) (Mast cell immunoglobulin-like receptor 1) |
| LILRB4 ILT3 LIR5 | Leukocyte immunoglobulin-like receptor subfamily B member 4 (CD85 |
| | antigen-like family member K) (Immunoglobulin-like transcript 3) (ILT- |
| | 3) (Leukocyte immunoglobulin-like receptor 5) (LIR-5) (Monocyte |
| | inhibitory receptor HM18) (CD antigen CD85k) |
| LILRB3 ILT5 LIR3 | Leukocyte immunoglobulin-like receptor subfamily B member 3 (LIR-3) |
| | (Leukocyte immunoglobulin-like receptor 3) (CD85 antigen-like family |
| | member A) (Immunoglobulin-like transcript 5) (ILT-5) (Monocyte |
| | inhibitory receptor HL9) (CD antigen CD85a) |
| KIR3DL3 CD158Z KIR3DL7 | Killer cell immunoglobulin-like receptor 3DL3 (CD158 antigen-like |
| KIRC1 | family member Z) (Killer cell inhibitory receptor 1) (CD antigen |
| | CD158z) |
| SIGLEC8 SAF2 | Sialic acid-binding Ig-like lectin 8 (Siglec-8) (Sialoadhesin family |
| | member 2) (SAF-2) |
| SIGLEC7 AIRM1 | Sialic acid-binding Ig-like lectin 7 (Siglec-7) (Adhesion inhibitory |
| | receptor molecule 1) (AIRM-1) (CDw328) (D-siglec) (QA79 membrane |
| | protein) (p75) (CD antigen CD328) |
| LILRB5 LIR8 | Leukocyte immunoglobulin-like receptor subfamily B member 5 (CD85 |
| | antigen-like family member C) (Leukocyte immunoglobulin-like |
| | receptor 8) (LIR-8) (CD antigen CD85c) |
| LILRB2 ILT4 LIR2 MIR10 | Leukocyte immunoglobulin-like receptor subfamily B member 2 (LIR-2) |
| | (Leukocyte immunoglobulin-like receptor 2) (CD85 antigen-like family |
| | member D) (Immunoglobulin-like transcript 4) (ILT-4) |
| | (Monocyte/macrophage immunoglobulin-like receptor 10) (MIR-10) |
| | (CD antigen CD85d) |
| SIGLEC5 CD33L2 OBBP2 | Sialic acid-binding Ig-like lectin 5 (Siglec-5) (CD33 antigen-like 2) |
| | (Obesity-binding protein 2) (OB-BP2) (OB-binding protein 2) (CD |
| | antigen CD170) |
| FCRL4 FCRH4 IFGP2 IRTA1 | Fc receptor-like protein 4 (FcR-like protein 4) (FcRL4) (Fc receptor |
| | homolog 4) (FcRH4) (IFGP family protein 2) (hIFGP2) (Immune receptor |
| | translocation-associated protein 1) (CD antigen CD307d) |
| PECAM1 | Platelet endothelial cell adhesion molecule (PECAM-1) (EndoCAM) |
| | (GPIIA′) (PECA1) (CD antigen CD31) |
| SIGLEC9 | Sialic acid-binding Ig-like lectin 9 (Siglec-9) (CDw329) (Protein FOAP-9) |
| UNQ668/PRO1302 | (CD antigen CD329) |
| SIGLEC6 CD33L CD33L1 | Sialic acid-binding Ig-like lectin 6 (Siglec-6) (CD33 antigen-like 1) |
| OBBP1 | (CDw327) (Obesity-binding protein 1) (OB-BP1) (CD antigen CD327) |
| CD33 SIGLEC3 | Myeloid cell surface antigen CD33 (Sialic acid-binding Ig-like lectin 3) |
| | (Siglec-3) (gp67) (CD antigen CD33) |
| FCRL5 FCRH5 IRTA2 | Fc receptor-like protein 5 (FcR-like protein 5) (FcRL5) (BXMAS1) (Fc |
| UNQ503/PRO820 | receptor homolog 5) (FcRH5) (Immune receptor translocation- |
| | associated protein 2) (CD antigen CD307e) |
| FCRL2 FCRH2 IFGP4 IRTA4 | Fc receptor-like protein 2 (FcR-like protein 2) (FcRL2) (Fc receptor |
| SPAP1 | homolog 2) (FcRH2) (IFGP family protein 4) (Immunoglobulin receptor |
| UNQ9236/PRO31998 | translocation-associated protein 4) (SH2 domain-containing |
| | phosphatase anchor protein 1) (CD antigen CD307b) |
| FCRL1 FCRH1 IFGP1 IRTA5 | Fc receptor-like protein 1 (FcR-like protein 1) (FcRL1) (Fc receptor |
| | homolog 1) (FcRH1) (IFGP family protein 1) (hIFGP1) (Immune receptor |
| | translocation-associated protein 5) (CD antigen CD307a) |
| SIGLEC12 SIGLECL1 SLG | Sialic acid-binding Ig-like lectin 12 (Siglec-12) (Sialic acid-binding Ig-like |
| UNQ9215/PRO34042 | lectin-like 1) (Siglec-L1) |
| FCRL3 FCRH3 IFGP3 IRTA3 | Fc receptor-like protein 3 (FcR-like protein 3) (FcRL3) (Fc receptor |
| SPAP2 | homolog 3) (FcRH3) (IFGP family protein 3) (hIFGP3) (Immune receptor |
| | translocation-associated protein 3) (SH2 domain-containing |
| | phosphatase anchor protein 2) (CD antigen CD307c) |
| MPZL1 PZR | Myelin protein zero-like protein 1 (Protein zero-related) |
| UNQ849/PRO1787 | |
| PILRA | Paired immunoglobulin-like type 2 receptor alpha (Cell surface |
| | receptor FDF03) (Inhibitory receptor PILR-alpha) |
| PVR PVS | Poliovirus receptor (Nectin-like protein 5) (NECL-5) (CD antigen CD155) |
| SIGLEC11 | Sialic acid-binding Ig-like lectin 11 (Sialic acid-binding lectin 11) (Siglec- |
| UNQ9222/PRO28718 | 11) |
| SIGLEC10 SLG2 | Sialic acid-binding Ig-like lectin 10 (Siglec-10) (Siglec-like protein 2) |
| UNQ477/PRO940 | |
| TNFRSF10D DCR2 TRAILR4 | Tumor necrosis factor receptor superfamily member 10D (Decoy |
| TRUNDD UNQ251/PRO288 | receptor 2) (DcR2) (TNF-related apoptosis-inducing ligand receptor 4) |
| | (TRAIL receptor 4) (TRAIL-R4) (TRAIL receptor with a truncated death |
| | domain) (CD antigen CD264) |
| TNFRSF10A APO2 DR4 | Tumor necrosis factor receptor superfamily member 10A (Death |
| TRAILR1 | receptor 4) (TNF-related apoptosis-inducing ligand receptor 1) (TRAIL |
| | receptor 1) (TRAIL-R1) (CD antigen CD261) |
| TNFRSF10B DR5 KILLER | Tumor necrosis factor receptor superfamily member 10B (Death |
| TRAILR2 TRICK2 ZTNFR9 | receptor 5) (TNF-related apoptosis-inducing ligand receptor 2) (TRAIL |
| UNQ160/PRO186 | receptor 2) (TRAIL-R2) (CD antigen CD262) |
| CD200R1 CD200R CRTR2 | Cell surface glycoprotein CD200 receptor 1 (CD200 cell surface |
| MOX2R OX2R | glycoprotein receptor) (Cell surface glycoprotein OX2 receptor 1) |
| UNQ2522/PRO6015 | |
| CD″XX″ | cluster of differentiation |
| RARRES1 | Retinoic Acid Receptor Responder (Tazarotene Induced) 1) |
| CCKBR | Cholecystokinin B Receptor |
| GALR1 | galanin receptor 1 |
| CUBN | Cubilin |
| MUC1 | Mucin 1 |
| 5T4 | Trophoblast glycoprotein, also known as TPBG |
| ROR1 | orphan-receptor tyrosine-kinase-like surface |
| Nkp30 | Natural cytotoxicity receptors (Synonym CD337) |
| NKG2D | Killer cell lectin-like receptor subfamily K, member 1 |
| CS1 | SLAM family member 7 |
| MART1 | Antigen LB39-AA, called also Antigen SK29-AA |
| WT1 | Wilms tumor protein |
| LMP2 | latent membrane protein 2 |
| gp100 | Glycoprotein 100 or Melanocyte protein PMEL |
| bcr-abl | called also BCR/ABL fusion protein isoform X8 |
| hTERT | Telomerase transcriptase |
| EphA2 | Eph receptor A2 |
| ERG | |
| PAX3 | Paired box protein Pax-3 |
| PD-1 | Programmed cell death protein 14-1BB |
| OX40 | tumor necrosis factor ligand superfamily member 4 |
| PSMA | Prostate specific membrane antigen |
| ICOS | Inducible T-cell costimulator |
| CTLA-4 | Cytotoxic T-lymphocyte protein 4 |
| LAG3 | Lymphocyte activation gene 3 protein |
| 2B4: | Natural killer cell receptor 2B4 (CD244 |
| CTLA-4 | Cytotoxic T-lymphocyte protein 4 |
| TIM-3 | Protein timeless |
| TIGIT | Protein Tigit |
| SIRPA | Tyrosine-protein phosphatase non-receptor type substrate 1 |
| ALK | ALK tyrosine kinase |
| Endoglin | also called CD105 |
| PD-L1 | Programmed cell death 1 ligand 1 |
| PD-L2 | Programmed cell death 1 ligand 2 |
| ICAM | Intercellular adhesion molecule |
| TCR | T cell receptor |
| Cas9 | CRISPR associated protein 9 |

[0020] The present invention provides an inhibitory chimeric antigen receptor (N-CAR) comprising:
[0021] an extracellular domain comprising an antigen binding domain;
[0022] a transmembrane domain;
[0023] an intracellular domain;

[0024] wherein said N-CAR comprises a polypeptide sequence involved in inducing an inhibitory transduction signal,

[0025] said polypeptide sequence comprises at least one sequence from a Tumor-necrosis-factor related apoptosis inducing ligand (TRAIL) receptor or at least one sequence from a CD200 receptor 1.

[0026] The present invention provides an inhibitory chimeric antigen receptor (N-CAR) comprising:
[0027] an extracellular domain comprising an antigen binding domain;
[0028] a transmembrane domain;
[0029] an intracellular domain;

[0030] wherein said N-CAR comprises a polypeptide sequence involved in inducing an inhibitory transduction signal upon binding of said extracellular domain comprising an antigen binding domain to an antigen and/or resulting in a decrease in CTL activity,

[0031] said polypeptide sequence comprises at least one sequence from a Tumor-necrosis-factor related apoptosis inducing ligand (TRAIL) receptor or at least one sequence from a CD200 receptor 1.

[0032] The present invention provides a N-CAR according to the above, comprising a polypeptide sequence from a Tumor-necrosis-factor related apoptosis inducing ligand (TRAIL) receptor.

[0033] The present invention provides a N-CAR according to the above comprising at least one polypeptide sequence from a polypeptide sequence selected from the list consisting of SEQ ID NO: 33 (human TR10D), SEQ ID NO: 34 (human TR10A) or SEQ ID NO: 35 (human TR10B) and a fragment thereof.

[0034] The present invention provides a N-CAR according to any one of the above embodiments, wherein said polypeptide sequence has more than 80%, preferably 90% and more preferably 95% identity with a sequence from SEQ ID NO: 33, SEQ ID NO: 34 or SEQ ID NO: 35 or a fragment thereof.

[0035] The present invention provides a N-CAR according to any one of the above embodiments, comprising at least one of the following polypeptide sequences: amino acids No 181-386 from SEQ ID NO: 33 (human TR10D), amino acids No 230-468 from SEQ ID NO: 34 (human TR10A) or of amino acids N° 179-440 from SEQ ID NO: 35 (human TR10B), or a fragment thereof.

[0036] The present invention provides a N-CAR according to any one of the above embodiments wherein said antigen binding domain binds to a cell surface antigen N, and N being not expressed on a cancerous cell and N being expressed on a non-cancerous cell or a healthy cell.

[0037] The present invention provides a N-CAR according to any one of the above embodiments, wherein the antigen binding domain binds to a cell-surface antigen N, N being present in normal tissue but not present or present at undetectable level on a tumor as determined by FACS or western blot analysis or by any appropriate technique allowing proteins to be quantified.

[0038] In the present invention non-cancerous cell or a healthy cell also expressing a P antigen, said

[0039] P antigen being also expressed or over expressed on a cancerous cell.

[0040] The present invention provides a N-CAR according to any one of the above embodiments wherein said antigen binding domain binds to at least one cell surface antigen N selected from CD56, CD205, CD83, CD206, CD200, CD36, troponin C, beta-1 integrin, CCKBR, GALR1 CUBN, CD4, CD20, CD22, CD25, MUC1, CD19, BCMA, and PSMA.

[0041] The present invention also provides

[0042] The N-CAR according to the above embodiments comprising at least one polypeptide sequence consisting essentially of amino acids No 181-386 from SEQ ID NO: 33 (human TR10D).

[0043] The N-CAR according to any one of the above embodiments, comprising at least one polypeptide sequence consisting essentially of amino acids No 230-468 from SEQ ID NO: 34 (human TR10A).

[0044] The N-CAR according to any one of the above embodiments, comprising at least one polypeptide sequence consisting essentially of amino acids No 179-440 from SEQ ID NO: 35 (human TR10B).

[0045] The N-CAR according comprising at least one polypeptide sequence from a CD200 Receptor 1, preferably comprising a sequence of SEQ ID NO. 36 or a fragment thereof.

[0046] An N-CAR according to any one of the above embodiments, wherein said N-CAR is a single chain (sc) N CAR or a multi-chain (mc) N-CAR.

[0047] The N-CAR according to any one of the above embodiments comprising at least one polypeptide sequence encoded by a sequence selected from the list consisting in SEQ ID NO. 102 to SEQ ID NO. 212.

[0048] The N-CAR according to any one of the above embodiments wherein the antigen binding domain binds to an off-tissue antigen.

[0049] An N-CAR according to the above embodiments, wherein said extracellular domain comprises at least one a single chain variable fragment scFv.

[0050] The N-CAR according to any one of the above embodiments, wherein said antigen binding domain comprises a Fv, a Fab, or a (Fab′)2.

[0051] The N-CAR according to any one of the above embodiments wherein said antigen binding domain binds to a cell surface antigen N, expressed on a non cancerous cell or a healthy cell expressing a P antigen.

[0052] In one embodiment N is P, in a preferred embodiment N is not P.

[0053] The N-CAR according to any one of above embodiments, wherein said antigen binding domain binds to CD19, CD20, CD22, BCMA, PSMA, CD56, CD205, CD83, CD206, CD200 or CD36.

[0054] The N-CAR according to any one of above embodiments, wherein said antigen binding domain binds to troponin C, beta-1 integrin, CCKBR, GALR1 or CUBN.

[0055] The N-CAR according to any one of above embodiments, wherein said antigen binding domain binds to CD4, CD20, CD22, CD25 or MUC1.

[0056] The N-CAR according to any one of above embodiments, wherein said antigen binding domain binds to troponin C, beta-1 integrin, CCKBR, GALR1 or MUC1.

[0057] The N-CAR according to any one of above embodiments wherein the transmembrane domain comprises the transmembrane region of PD-1.

[0058] The N-CAR according to any one of above embodiments wherein the N-CAR comprises the transmembrane region of PD-1, or a fragment thereof.

[0059] The N-CAR according to any one of above embodiments wherein the transmembrane domain comprises the transmembrane region(s) of CD8 alpha.

[0060] The N-CAR according to any one of the above embodiments wherein the transmembrane domain is attached to the extracellular domain of the N-CAR via a hinge.

[0061] The N-CAR according to the above embodiments wherein the hinge is a human immunoglobulin hinge.

[0062] The N-CAR according to the above embodiments wherein the hinge is an IgG1 hinge or a CD8 alpha hinge.

[0063] The N-CAR according to any one of the above embodiments wherein the transmembrane domain comprises a transmembrane region(s) of the alpha, beta or zeta chain of the T-cell receptor, PD-1, 4-1BB, OX40, ICOS, CTLA-4, LAG3, 2B4, BTLA4, TIM-3, TIGIT, SIRPA, CD28, CD3 epsilon, CD45, CD4, CD5, CD8, CD9, CD16, CD22, CD33, CD37, CD64, CD80, CD86, CD134, CD137 or CD154.

[0064] The present invention provides a vector encoding a N-CAR according to any one of the above embodiments.

[0065] The present invention provides an immune cell, preferably a primary immune T cell comprising a P-CAR comprising:
[0066] an extracellular domain comprising an antigen binding domain;
[0067] a transmembrane domain;
[0068] an intracellular domain; preferably a intracellular domain comprising an activator transducing domain and an co-stimulatory domain,

[0069] and a N-CAR according to any one of the above embodiments.

[0070] In a preferred embodiment activation of the N-CAR inhibits the signal transduction activity related to the P-CAR, resulting in particular in a decrease in the CTL activity or the immune cell bearing a N-CAR and a P-CAR.

[0071] In one preferred embodiment the present invention provides a immune cell according to the above embodiment wherein at least one gene encoding a TCR alpha or a TCR beta subunit is inactivated, preferably by deletion using a specific endonuclease.

[0072] In one embodiment the present invention provides an immune cell according to any one of the above embodiments wherein at least one gene encoding a TCR and a gene encoding a deoxicitidine kinase (dck) are inactivated, preferably by deletion using a endonuclease, preferably a TALEN.

[0073] In one embodiment the present invention provides an immune cell according to any one of the above embodiments for use as a medicament.

[0074] In one embodiment the present invention provides an immune cell according to any one of the above embodiments for use in the prevention or treatment of a haematological cancer condition, preferably a relapsed refractory haematological cancer.

[0075] The immune cell according to the above embodiments, wherein said haematological cancer condition is leukemia or myeloma, preferably relapsed and/or refractory leukemia or relapsed and/or refractory myeloma.

[0076] In one embodiment the present invention provides a method of engineering an immune cell according to any one of the above embodiments comprising:
[0077] (a) Providing an immune cell; optionally deleting a candidate gene, said candidate gene being preferably TCRA and dCK
[0078] (b) Expressing a N-CAR and a P-CAR according to the invention at the cell surface.
[0079] (c) optionally deleting a candidate gene, said candidate gene being preferably selected from TCRA, PD1, CTLA4 and dCK

[0080] In one embodiment the present invention provides a method as above wherein said immune cells are provided from a donor, preferably a healthy donor.

[0081] In one embodiment the present invention provides a vector comprising a sequence selected from the list consisting in SEQ ID NO. 102 to SEQ ID NO. 212.

[0082] The immune cell according to the above embodiments is provided wherein the immune cell is a T-cell, preferably a CD4 T cell or a CD8 T cell, more preferably a primary CD8 T cell.

[0083] The immune cell according to the above embodiments wherein the T-cell is a human T-cell, preferably a primary immune T cell.

[0084] The immune cell according to the above embodiments wherein the P CAR binds to at least one of the following antigen CD123, CD22, CS1, CD38, CD19, CD33, CD20.

[0085] The immune cell according to the above embodiments is selected from primary inflammatory T-lymphocytes, primary cytotoxic T-lymphocytes, primary regulatory T-lymphocytes or primary helper T-lymphocytes.

[0086] In one embodiment the present invention provides an immune cell according to any one of the above embodiments, wherein the cell surface antigen to which the antigen binding domain of the P-CAR binds to is CD38 and the cell surface antigen to which the antigen binding domain of the N-CAR binds to is CD56, CD205, CD83, CD206, CD200 or CD36.

[0087] In one embodiment the present invention provides an immune cell according to any one of the above embodiments, wherein the cell surface antigen to which the antigen binding domain of the P-CAR binds to is CS1 and the cell surface antigen to which the antigen binding domain of the N-CAR binds to is troponin C, beta-1 integrin, CCKBR, GALR1 or CUBN.

[0088] In one embodiment the present invention provides an immune cell according to any one of the above embodiments, wherein the cell surface antigen to which the antigen binding domain of the P-CAR binds to is CD123 and the antigen to which the antigen binding domain of the N-CAR binds is CD4, CD20, CD22, CD25 or MUC1.

[0089] In one embodiment the present invention provides an immune cell according to any one of the above embodiments wherein the cell surface antigen to which the antigen binding domain of the P-CAR binds to is ROR1 and the cell surface antigen to which the antigen binding domain of the N-CAR binds is troponin C, beta-1 integrin, CCKBR, GALR1 or MUC1.

[0090] In one embodiment the present invention provides an immune cell for use as a medicament

[0091] In one embodiment the present invention provides an immune cell for the treatment of a leukemia selected from the group consisting of acute myelogenous leukemia (AML).

[0092] The present invention provides an immune cell according to the above embodiments for use in therapy, wherein the condition is a pre-malignant or malignant cancer condition characterized by CD123-expressing cells or by CLL-1 expressing cells

[0093] The immune cell according to any one of the above embodiments, wherein said haematological cancer condition is multiple myeloma (MM).

[0094] The immune cell according to the above embodiments for use in therapy, wherein the condition is a pre-malignant or malignant cancer condition characterized by CD38-expressing cells.

[0095] The immune cell according to the above embodiments, wherein said haematological cancer condition is chronic lymphocytic leukemia (CLL).

[0096] The immune cell according to the above embodiments for use in therapy, wherein the condition is a pre-malignant or malignant cancer condition characterized by CS1-expressing cells or by ROR1-expressing cells.

[0097] The immune cell according to the above embodiments for use in therapy, wherein the condition is a solid tumor such as breast, colon, lung, or kidney tumor characterized especially by ROR1-expressing cells.

[0098] The immune cell according to the above embodiments for use in therapy, wherein the condition is a pre-malignant or malignant cancer condition characterized by CD22-expressing cells.

[0099] The immune cell according to any one of the above wherein the reduction of activation of the immune cells when both the P-CAR and N-CAR bind to their respective antigens is increased, preferably by at least 5%, 10%, 15%, 20% or 30% as compared to the same immune cell wherein a P-CAR alone binds to its cell surface antigen, and/or as compared to an immune cell expressing a full intracellular domain of PD-1 or a full intracellular domain of CTLA-4 as an intracellular domain of said N-CAR.

[0100] The immune cell according to any one of the above embodiments wherein the level of activation of the immune cell is determined by measuring cytokine production.

[0101] The immune cell according to claim 34 wherein the cytokine is IFNgamma or TNFalpha.

[0102] The immune cell according to any one of the above embodiments wherein the cytokine production is measured by ELISA and/or FACS and/or luminex.

[0103] The immune cell according to any one of the above embodiments wherein the level of activation of the immune cell is determined by the level of degranulation.

[0104] The immune cell according to any one of the above embodiments wherein degranulation is measured by measuring expression of CD107a by FACS.

[0105] The immune cell according to any one of the above embodiments wherein the level of activation of the immune cell is measured by monitoring the ability of the immune cell to kill target cells.

[0106] The present invention provides a method of engineering an immune cell according to any one of the above embodiments comprising:
[0107] (a) Introducing into said cell at least one polynucleotide encoding the N-CAR and at least one polynucleotide encoding the CAR;
[0108] (b) Expressing said polynucleotides into said cell.

[0109] The present invention provides a method for treating a patient in need thereof comprising:
[0110] a) Providing an immune cell according to any one of the above embodiments, and;
[0111] b) Administrating said T-cells to said patient.

[0112] The present invention discloses a method for treating a patient according to any one of the above embodiments wherein said immune cells are recovered from patients.

[0113] The different objects of the present invention are disclosed in details as follows

[0114] Inhibitory Chimeric Antigen Receptor (iCAR or N-CAR)

[0115] The present invention relates to an inhibitory chimeric antigen receptor (iCAR or N-CAR) comprising:
[0116] an extracellular domain comprising an antigen binding domain;
[0117] a transmembrane domain;
[0118] an intracellular domain;

[0119] wherein said intracellular domain comprises a polypeptide sequence involved in transduction signal said polypeptide sequence is not significantly expressed in T-cell, preferably in primary T cells, and/or said polypeptide sequence is from a Tumor-necrosis-factor related apoptosis inducing ligand (TRAIL) receptor and/or CD200 receptor 1,

[0120] provided said polypeptide sequence not expressed in T cells is not an ITMS, preferably it does not consists in (or does not comprise) a sequence chosen in a group consisting of SEQ ID NO:13 (human SIGL8), SEQ ID NO:14 (human SIGL7), SEQ ID NO:17 (human SIGL5), SEQ ID NO:20 (human SIGL9), SEQ ID NO: 21 (human SIGL6), SEQ ID NO:22 (human CD33), SEQ ID NO:26 (human SIG12), SEQ ID NO:31 (human SIG11), SEQ ID NO:32 (human SIG10) and SEQ ID NO:19 (human PECA1).

[0121] Intracellular Domain of the CAR-N According to the Invention

[0122] According to one embodiment, the intracellular domain of the N-CAR comprises a polypeptide sequence from a receptor involved in transduction signal which is not significantly expressed in non-engineered T-cells. By “not significantly expressed” is meant that the protein involved in the transduction signal, which intracellular domain is from, is not expressed or expressed at a significant lower level in the same culture or growth conditions in a non-engineered T-Cell. By “engineered T-cells” are meant T-cells that have been genetically modified to express or to unable expression of a given genetic sequence.

[0123] Here, by “not significantly expressed”, it is meant that the expression of said polypeptide, preferably cell surface expression below the level of detection using any appropriate technique such as flow cytometry analysis, western blot or Elisa test or that said polypeptide is expressed at a level of less than 20% and preferably less than 10% and more preferably at undetectable level in a given cell as compared the expression of said polypeptide measured in a cell known to express said polypeptide used as a positive control.

[0124] This can be tested by currently used techniques allowing expression of proteins to be measured and quantified that is using western blot, flow cytometry analysis, Elisa test and others.

[0125] According to one embodiment, the intracellular domain of the N-CAR comprises a polypeptide sequence involved in transduction signal of a receptor, and said receptor is not significantly expressed in T-cells.

[0126] In a preferred embodiment, said polypeptide sequence is from a sequence selected from the group consisting of SEQ ID NO: 1 (human KI2L2), SEQ ID NO: 2 (human KI2L1), SEQ ID NO:3 human FCG2B), SEQ ID NO:4 (human KI2L3), SEQ ID NO: 5 (human KI3L2), SEQ ID NO:6 (human KI2L4), SEQ ID NO:7 (human KI3L1), SEQ ID NO:8 (human KI2LA), SEQ ID NO:9 (human MILR1), SEQ ID NO:10 (human LIRB4), SEQ ID NO:11 (human LIRB3), SEQ ID NO:12 (human KI3L3), SEQ ID NO:15 (human LIRB5), SEQ ID NO:16 (human LIRB2), SEQ ID NO:18 (human FCRL4), SEQ ID NO:23 (human FCRL5), SEQ ID NO:24 (human FCRL2), SEQ ID NO: 25 (human FCRL1), SEQ ID NO:27 (human FCRL3), SEQ ID NO:28 (human MPZL1), SEQ ID NO:29 (human PILRA), SEQ ID NO:30 (human PVR), and a fragment thereof.

[0127] In a more preferred embodiment said polypeptide sequences is SEQ ID NO: 1 (human KI2L2) or a fragment thereof.

[0128] In a more preferred embodiment said polypeptide sequences is SEQ ID NO: 2 (human KI2L1), or a fragment thereof.

[0129] In a more preferred embodiment said polypeptide sequences is SEQ ID NO:3 (human FCG2B), or a fragment thereof.

[0130] In a more preferred embodiment said polypeptide sequences is SEQ ID NO:4 (human KI2L3), or a fragment thereof.

[0131] In a more preferred embodiment said polypeptide sequences is SEQ ID NO: 5 (human KI3L2), or a fragment thereof.

[0132] In a more preferred embodiment said polypeptide sequences is SEQ ID NO:6 (human KI2L4), or a fragment thereof.

[0133] In a more preferred embodiment said polypeptide sequences is SEQ ID NO:7 (human KI3L1), or a fragment thereof.

[0134] In a more preferred embodiment said polypeptide sequences is SEQ ID NO:8 (human KI2LA), or a fragment thereof.

[0135] In a more preferred embodiment said polypeptide sequences is SEQ ID NO:9 (human MILR1), or a fragment thereof.

[0136] In a more preferred embodiment said polypeptide sequences is SEQ ID NO:10 (human LIRB4), or a fragment thereof.

[0137] In a more preferred embodiment said polypeptide sequences is SEQ ID NO:11 (human LIRB3), or a fragment thereof.

[0138] In a more preferred embodiment said polypeptide sequences is SEQ ID NO:12 (human KI3L3), or a fragment thereof.

[0139] In a more preferred embodiment said polypeptide sequences is SEQ ID NO:15 (human LIRB5), or a fragment thereof.

[0140] In a more preferred embodiment said polypeptide sequences is SEQ ID NO:16 (human LIRB2), or a fragment thereof.

[0141] In a more preferred embodiment said polypeptide sequences is SEQ ID NO:18 (human FCRL4), or a fragment thereof.

[0142] In a more preferred embodiment said polypeptide sequences is SEQ ID NO:23 (human FCRL5), or a fragment thereof.

[0143] In a more preferred embodiment said polypeptide sequences is SEQ ID NO:24 (human FCRL2), or a fragment thereof.

[0144] In a more preferred embodiment said polypeptide sequences is SEQ ID NO: 25 (human FCRL1), or a fragment thereof.

[0145] In a more preferred embodiment said polypeptide sequences is SEQ ID NO:27 (human FCRL3), or a fragment thereof.

[0146] In a more preferred embodiment said polypeptide sequences is SEQ ID NO:28 (human MPZL1), or a fragment thereof.

[0147] In a more preferred embodiment said polypeptide sequences is SEQ ID NO:29 (human PILRA), or a fragment thereof.

[0148] In a more preferred embodiment said polypeptide sequences is SEQ ID NO:30 (human PVR), or a fragment thereof.

[0149] In another embodiment according to the invention, said polypeptide sequence has more than 80%, preferably 90% and more preferably 95% identity with a sequence from a sequence selected from SEQ ID NO: 1 (human KI2L2), SEQ ID NO: 2 (human KI2L1), SEQ ID NO:3 (human FCG2B), SEQ ID NO:4 (human KI2L3), SEQ ID NO: 5 (human KI3L2), SEQ ID NO:6 (human KI2L4), SEQ ID NO:7 (human KI3L1), SEQ ID NO:8 (human KI2LA), SEQ ID NO:9 (human MILR1), SEQ ID NO:10 (human LIRB4), SEQ ID NO:11 (human LIRB3), SEQ ID NO:12 (human KI3L3), SEQ ID NO:15 (human LIRB5), SEQ ID NO:16 (human LIRB2), SEQ ID NO:18 (human FCRL4), SEQ ID NO:23 (human FCRL5), SEQ ID NO:24 (human FCRL2), SEQ ID NO: 25 (human FCRL1), SEQ ID NO:27 (human FCRL3), SEQ ID NO:28 (human MPZL1), SEQ ID NO:29 (human PILRA), SEQ ID NO:30 (human PVR).

[0150] The above sequences are presented in the following Table 1.

[0151] The architecture of some exemplary N-CARs is presented in the following Table 2.

TABLE 1
Amino-acid sequences of intracellular domain from a receptor involved in transduction
signal which is not significantly expressed in non-engineered T-cell (Sequences SEQ NO: 13
(human SIGL8), SEQ ID NO: 14 (human SIGL7), SEQ ID NO: 17 (human SIGL5), SEQ ID NO: 20
(human SIGL9), SEQ ID NO: 21 (human SIGL6), SEQ ID NO: 22 (human CD33), SEQ ID NO: 26
(human SIG12), SEQ ID NO: 31 (human SIG11), SEQ ID NO: 32 (human SIG10) and SEQ ID NO: 19
being not part of the present invention)

| | UniProt | SEQ | |
|---|---|---|---|
| Name | ID | ID NO: | |
| human KI2L2 | P43627 | 1 | MWSHLNRLLFWSIFSSVTCRKAVLDCEAMKTNEFPSPCLDSKTKVVMKGQNVSMFCSHKNKSLQITYSLFRRK |
| | | | THLGTQDGKGEPAIFNLSITEAHESGPYKCKAQVTSCSKYSRDFSFTIVDPVTSPVLNIMVIQTETDRHITLH |
| | | | CLSVNGSLPINYTFFENHVAISPAISKYDREPAEFNLTKKNPGEEEEYRCEAKNRLPNYATYSHPVTMPSTGG |
| | | | DSCPFCLKLLLPGLLLLLVVIILILAFWVLPKYKTRKAMRNNVPRDRGDTAMEVGIYANILEKQAKEESVPEV |
| | | | GSRPCVSTAQDEAKHSQELQYATPVFQEVAPREQEACDSYKSGYVYSELNF |
| human KI2L1 | P43626 | 2 | MIPTFTALLCLGLSLGPRTHMQAGPLPKPTLWAEPGSVISWGNSVTIWCQGTLEAREYRLDKEESPAPWDRQN |
| | | | PLEPKNKARFSIPSMTEDYAGRYRCYYRSPVGWSQPSDPLELVMTGAYSKPTLSALPSPLVTSGKSVTLLCQS |
| | | | RSPMDTFLLIKERAAHPLLHLRSEHGAQQHQAEFPMSPVTSVHGGTYRCFSSHGFSHYLLSHPSDPLELIVSG |
| | | | SLEDPRPSPTRSVSTAAGPEDQPLMPTGSVPHSGLRRHWEVLIGVLVVSILLLSLLLFLLLQHWRQGKHRTLA |
| | | | QRQADFQRPPGAAEPEPKDGGLQRRSSPAADVQGENFCAAVKNTQPEDGVEMDTRQSPHDEDPQAVTYAKVKH |
| | | | SRPRREMASPPSPLSGEFLDTKDRQAEEDRQMDTEAAASEAPQDVTYAQLHSFTLRQKATEPPPSQEGASPAE |
| | | | PSVYATLAIH |
| human FCG2B | P31994 | 3 | MTPALTALLCLGLSLGPRTRVQAGPFPKPTLWAEPGSVISWGSPVTIWCQGSQEAQEYRLHKEGSPEPLDRNN |
| | | | PLEPKNKARFSIPSMTEHHAGRYRCHYYSSAGWSEPSDPLEMVMTGAYSKPTLSALPSPVVASGGNMTLRCGS |
| | | | QKGYHHFVLMKEGEHQLPRTLDSQQLHSRGFQALFPVGPVTPSHRWRFTCYYYYTNTPWVWSHPSDPLEILPS |
| | | | GVSRKPSLLTLQGPVLAPGQSLTLQCGSDVGYNRFVLYKEGERDFLQRPGQQPQAGLSQANFTLGPVSPSNGG |
| | | | QYRCYGAHNLSSEWSAPSDPLNILMAGQIYDTVSLSAQPGPTVASGENVTLLCQSWWQFDTFLLTKEGAAHPP |
| | | | LRLRSMYGAHKYQAEFPMSPVTSAHAGTYRCYGSYSSNPHLLSHPSEPLELVVSGHSGGSSLPPTGPPSTPGL |
| | | | GRYLEVLIGVSVAFVLLLFLLLFLLLRRQRHSKHRTSDQRKTDFQRPAGAAETEPKDRGLLRRSSPAADVQEE |
| | | | NLYAAVKDTQSEDRVELDSQSPHDEDPQAVTYAPVKHSSPRREMASPPSSLSGEFLDTKDRQVEEDRQMDTEA |
| | | | AASEASQDVTYAQLHSLTLRRKATEPPPSQEGEPPAEPSIYATLAIH |
| human KI2L3 | P43628 | 4 | MSLMVVSMACVGFFLLEGPWPHVGGQDKPFLSAWPGTVVSEGQHVTLQCRSRLGFNEFSLSKEDGMPVPELYN |
| | | | RIFRNSFLMGPVTPAHAGTYRCCSSHPHSPTGWSAPSNPVVIMVTGVHRKPSLLAHPGPLVKSGETVILQCWS |
| | | | DVRFERFLLHREGITEDPLRLVGQLHDAGSQVNYSMGPMTPALAGTYRCFGSVTHLPYELSAPSDPLDIVVVG |
| | | | LYGKPSLSAQPGPTVQAGENVTLSCSSRSLFDIYHLSREAEAGELRLTAVLRVNGTFQANFPLGPVTHGGNYR |
| | | | CFGSFRALPHAWSDPSDPLPVSVTGNSRHLHVLIGTSVVIIPFAILLFFLLHRWCANKKNAVVMDQEPAGNRT |
| | | | VNREDSDEQDPQEVTYAQLNHCVFTQRKITRPSQRPKTPPTDTSV |
| human KI3L2 | P43630 | 5 | MLLLLLLLPLLWGTKGMEGDRQYGDGYLLQVQELVTVQEGLCVHVPCSFSYPQDGWTDSDPVHGYWFRAGDRP |
| | | | YQDAPVATNNPDREVQAETQGRFQLLGDIWSNDCSLSIRDARKRDKGSYFFRLERGSMKWSYKSQLNYKTKQL |
| | | | SVFVTALTHRPDILILGTLESGHSRNLTCSVPWACKQGTPPMISWIGASVSSPGPTTARSSVLTLTPKPQDHG |
| | | | TSLTCQVTLPGTGVTTTSTVRLDVSYPPWNLTMTVFQGDATASTALGNGSSLSVLEGQSLRLVCAVNSNPPAR |
| | | | LSWTRGSLTLCPSRSSNPGLLELPRVHVRDEGEFTCRAQNAQGSQHISLSLSLQNEGTGTSRPVSQVTLAAVG |
| | | | GAGATALAFLSFCIIFIIVRSCRKKSARPAAGVGDTGMEDAKAIRGSASQGPLTESWKDGNPLKKPPPAVAPS |
| | | | SGEEGELHYATLSFHKVKPQDPQGQEATDSEYSEIKIHKRETAETQACLRNHNPSSKEVRG |
| human KI2L4 | Q99706 | 6 | MLLLLLLPLLWGRERVEGQKSNRKDYSLTMQSSVTVQEGMCVHVRCSFSYPVDSQTDSDPVHGYWFRAGNDIS |
| | | | WKAPVATNNPAWAVQEETRDRFHLLGDPQTKNCTLSIRDARMSDAGRYFFRMEKGNIKWNYKYDQLSVNVTAL |
| | | | THRPNILIPGTLESGCFQNLTCSVPWACEQGTPPMISWMGTSVSPLHPSTTRSSVLTLIPQPQHHGTSLTCQV |
| | | | TLPGAGVTTNRTIQLNVSYPPQNLTVTVFQGEGTASTALGNSSSLSVLEGQSLRLVCAVDSNPPARLSWTWRS |
| | | | LTLYPSQPSNPLVLELQVHLGDEGEFTCRAQNSLGSQHVSLNLSLQQEYTGKMRPVSGVLLGAVGGAGATALV |
| | | | FLSFCVIFIVVRSCRKKSARPAADVGDIGMKDANTIRGSASQGNLTESWADDNPRHHGLAAHSSGEEREIQYA |
| | | | PLSFHKGEPQDLSGQEATNNEYSEIKIPK |
| human KI3L1 | P43629 | 7 | MTLTLSVLICLGLSVGPRTCVQAGTLPKPTLWAEPASVIARGKPVTLWCQGPLETEEYRLDKEGLPWARKRQN |
| | | | PLEPGAKAKFHIPSTVYDSAGRYRCYYETPAGWSEPSDPLELVATGFYAEPTLLALPSPVVASGGNVTLQCDT |
| | | | LDGLLTFVLVEEEQKLPRTLYSQKLPKGPSQALFPVGPVTPSCRWRFRCYYYYRKNPQVWSNPSDLLEILVPG |
| | | | VSRKPSLLIPQGSVVARGGSLTLQCRSDVGYDIFVLYKEGEHDLVQGSGQQPQAGLSQANFTLGPVSRSHGGQ |
| | | | YRCYGAHNLSPRWSAPSDPLDILIAGLIPDIPALSVQPGPKVASGENVTLLCQSWHQIDTFFLTKEGAAHPPL |
| | | | CLKSKYQSYRHQAEFSMSPVTSAQGGTYRCYSAIRSYPYLLSSPSYPQELVVSGPSGDPSLSPTGSTPTPGPE |
| | | | DQPLTPTGLDPQSGLGRHLGVVTGVSVAFVLLLFLLLFLLLRHRHQSKHRTSAHFYRPAGAAGPEPKDQGLQK |
| | | | RASPVADIQEEILNAAVKDTQPKDGVEMDARAAASEAPQDVTYAQLHSLTLRREATEPPPSQEREPPAEPSIY |
| | | | APLAIH |
| human KI2LA | Q8N109 | 8 | MTPIVTVLICLGLSLGPRTHVQTGTIPKPTLWAEPDSVITQGSPVTLSCQGSLEAQEYRLYREKKSASWITRI |
| | | | RPELVKNGQFHIPSITWEHTGRYGCQYYSRARWSELSDPLVLVMTGAYPKPTLSAQPSPVVTSGGRVTLQCES |
| | | | QVAFGGFILCKEGEEEHPQCLNSQPHARGSSRAIFSVGPVSPNRRWSHRCYGYDLNSPYVWSSPSDLLELLVP |
| | | | GVSKKPSLSVQPGPVVAPGESLTLQCVSDVGYDRFVLYKEGERDLRQLPGRQPQAGLSQANFTLGPVSRSYGG |
| | | | QYRCYGAHNLSSECSAPSDPLDILITGQIRGTPFISVQPGPTVASGENVTLLCQSWRQFHTFLLTKAGAADAP |
| | | | LRLRSIHEYPKYQAEFPMSPVTSAHAGTYRCYGSLNSDPYLLSHPSEPLELVVSGPSMGSSPPPTGPISTPAG |
| | | | PEDQPLTPTGSDPQSGLGRHLGVVIGILVAVVLLLLLLLLLFLILRHRRQGKHWTSTQRKADFQHPAGAVGPE |
| | | | PTDRGLQWRSSPAADAQEENLYAAVKDTQPEDGVEMDTRAAASEAPQDVTYAQLHSLTLRRKATEPPPSQERE |
| | | | PPAEPSIYATLAIH |
| human MILR1 | Q7Z6M3 | 9 | MLPLLLLPLLWGGSLQEKPVYELQVQKSVTVQEGLCVLVPCSFSYPWRSWYSSPPLYVYWFRDGEIPYYAEVV |
| | | | ATNNPDRRVKPETQGRFRLLGDVQKKNCSLSIGDARMEDTGSYFFRVERGRDVKYSYQQNKLNLEVTALIEKP |
| | | | DIHFLEPLESGRPTRLSCSLPGSCEAGPPLTFSWTGNALSPLDPETTRSSELTLTPRPEDHGTNLTCQMKRQG |
| | | | AQVTTERTVQLNVSYAPQTITIFRNGIALEILQNTSYLPVLEGQALRLLCDAPSNPPAHLSWFQGSPALNATP |
| | | | ISNTGILELRRVRSAEEGGFTCRAQHPLGFLQIFLNLSVYSLPQLLGPSCSWEAEGLHCRCSFRARPAPSLCW |
| | | | RLEEKPLEGNSSQGSFKVNSSSAGPWANSSLILHGGLSSDLKVSCKAWNIYGSQSGSVLLLQGRSNLGTGVVP |
| | | | AALGGAGVMALLCICLCLIFFLIVKARRKQAAGRPEKMDDEDPIMGTITSGSRKKPWPDSPGDQASPPGDAPP |
| | | | LEEQKELHYASLSFSEMKSREPKDQEAPSTTEYSEIKTSK |
| human LIRB4 | Q8NHJ6 | 10 | MLLWASLLAFAPVCGQSAAAHKPVISVHPPWTTFFKGERVTLTCNGFQFYATEKTTWYHRHYWGEKLTLTPGN |
| | | | TLEVRESGLYRCQARGSPRSNPVRLLFSSDSLILQAPYSVFEGDTLVLRCHRRRKEKLTAVKYTWNGNILSIS |
| | | | NKSWDLLIPQASSNNNGNYRCIGYGDENDVFRSNFKIIKIQELFPHPELKATDSQPTEGNSVNLSCETQLPPE |
| | | | RSDTPLHFNFFRDGEVILSDWSTYPELQLPTVWRENSGSYWCGAETVRGNIHKHSPSLQIHVQRIPVSGVLLE |
| | | | TQPSGGQAVEGEMLVLVCSVAEGTGDTTFSWHREDMQESLGRKTQRSLRAELELPAIRQSHAGGYYCTADNSY |
| | | | GPVQSMVLNVTVRETPGNRDGLVAAGATGGLLSALLLAVALLFHCWRRRKSGVGFLGDETRLPPAPGPGESSH |
| | | | SICPAQVELQSLYVDVHPKKGDLVYSEIQTTQLGEEEEANTSRTLLEDKDVSVVYSEVKTQHPDNSAGKISSK |
| | | | DEES |
| human LIRB3 | O75022 | 11 | MQPRWAQGATMWLGVLLTLLLCSSLEGQENSFTINSVDMKSLPDWTVQNGKNLTLQCFADVSTTSHVKPQHQM |
| | | | LFYKDDVLFYNISSMKSTESYFIPEVRIYDSGTYKCTVIVNNKEKTTAEYQLLVEGVPSPRVTLDKKEAIQGG |
| | | | IVRVNCSVPEEKAPIHFTIEKLELNEKMVKLKREKNSRDQNFVILEFPVEEQDRVLSFRCQARIISGIHMQTS |
| | | | ESTKSELVTVTESFSTPKFHISPTGMIMEGAQLHIKCTIQVTHLAQEFPEIIIQKDKAIVAHNRHGNKAVYSV |
| | | | MAMVEHSGNYTCKVESSRISKVSSIVVNITELFSKPELESSFTHLDQGERLNLSCSIPGAPPANFTIQKEDTI |
| | | | VSQTQDFTKIASKSDSGTYICTAGIDKVVKKSNTVQIVVCEMLSQPRISYDAQFEVIKGQTIEVRCESISGTL |
| | | | PISYQLLKTSKVLENSTKNSNDPAVFKDNPTEDVEYQCVADNCHSHAKMLSEVLRVKVIAPVDEVQISILSSK |
| | | | VVESGEDIVLQCAVNEGSGPITYKFYREKEGKPFYQMTSNATQAFWTKQKASKEQEGEYYCTAFNRANHASSV |
| | | | PRSKILIVRVILAPWKKGLIAVVIIGVIIALLIIAAKCYFLRKAKAKQMPVEMSRPAVPLLNSNNEKMSDPNM |
| | | | EANSHYGHNDDVRNHAMKPINDNKEPLNSDVQYTEVQVSSAESHKDLGKKDTETVYSEVRKAVPDAVESRYSR |
| | | | TEGSLDGT |
| human KI3L3 | Q8N743 | 12 | MLLLLLPLLWGRERAEGQTSKLLTMQSSVTVQEGLCVHVPCSFSYPSHGWIYPGPVVHGYWFREGANTDQDAP |
| | | | VATNNPARAVWEETRDRFHLLGDPHTKNCTLSIRDARRSDAGRYFFRMEKGSIKWNYKHHRLSVNVTALTHRP |
| | | | NILIPGTLESGCPQNLTCSVPWACEQGTPPMISWIGTSVSPLDPSTTRSSVLTLIPQPQDHGTSLTCQVTFPG |
| | | | ASVTTNKTVHLNVSYPPQNLTMTVFQGDGTVSTVLGNGSSLSLPEGQSLRLVCAVDAVDSNPPARLSLSWRGL |
| | | | TLCPSQPSNPGVLELPWVHLRDAAEFTCRAQNPLGSQQVYLNVSLQSKATSGVTQGVVGGAGATALVFLSFCV |
| | | | IFVVVRSCRKKSARPAAGVGDTGIEDANAVRGSASQGPLTEPWAEDSPPDQPPPASARSSVGEGELQYASLSF |
| | | | QMVKPWDSRGQEATDTEYSEIKIHR |
| human SIGL8 | Q9NYZ4 | 13 | MQGAQEASASEMLPLLLPLLWAGALAQERRFQLEGPESLTVQEGLCVLVPCRLPTTLPASYYGYGYWFLEGAD |
| | | | VPVATNDPDEEVQEETRGRFHLLWDPRRKNCSLSIRDARRRDNAAYFFRLKSKWMKYGYTSSKLSVRVMALTH |
| | | | RPNISIPGTLESGHPSNLTCSVPWVCEQGTPPIFSWMSAAPTSLGPRTTQSSVLTITPRPQDHSTNLTCQVTF |
| | | | PGAGVTMERTIQLNVSYAPQKVAISIFQGNSAAFKILQNTSSLPVLEGQALRLLCDADGNPPAHLSWFQGFPA |
| | | | LNATPISNTGVLELPQVGSAEEGDFTCRAQHPLGSLQISLSLFVHWKPEGRAGGVLGAVWGASITTLVFLCVC |
| | | | FIFRVKTRRKKAAQPVQNTDDVNPVMVSGSRGHQHQFQTGIVSDHPAEAGPISEDEQELHYAVLHFHKVQPQE |
| | | | PKVTDTEYSEIKIHK |
| human SIGL7 | Q9Y286 | 14 | MPLLLLLPLLWAGALAMDPNFWLQVQESVTVQEGLCVLVPCTFFHPIPYYDKNSPVHGYWFREGAIISRDSPV |
| | | | ATNKLDQEVQEETQGRFRLLGDPSRNNCSLSIVDARRRDNGSYFFRMERGSTKYSYKSPQLSVHVTDLTHRPK |
| | | | ILIPGTLEPGHSKNLTCSVSWACEQGTPPIFSWLSAAPTSLGPRTTHSSVLIITPRPQDHGTNLTCQVKFAGA |
| | | | GVTTERTIQLNVTYVPQNPUGIFPGDGSGKQETRAGVVHGAIGGAGVTALLALCLCLIFFIVKTHRRKAARTA |
| | | | VGRNDTHPTTGSASPKHQKKSKLHGPTETSSCSGAAPTVEMDEELHYASLNFHGMNPSKDTSTEYSEVRTQ |
| human LIRB5 | O75023 | 15 | MLLWVILLVLAPVSGQFARTPRPIIFLQPPWTTVFQGERVTLTCKGFRFYSPQKTKWYHRYLGKEILRETPDN |
| | | | ILEVQESGEYRCQAQGSPLSSPVHLDFSSASLILQAPLSVFEGDSVVLRCRAKAEVTLNNTIYKNDNVLAFLN |
| | | | KRTDFHIPHACLKDNGAYRCTGYKESCCPVSSNTVKIQVQEPFTRPVLRASSFQPISGNPVTLTCETQLSLER |
| | | | SDVPLRFRFFRDDQTLGLGWSLSPNFQITAMWSKDSGFYWCKAATMPYSVISDSPRSWIQVQIPASHPVLTLS |
| | | | PEKALNFEGTKVTLHCETQEDSLRTLYRFYHEGVPLRHKSVRCERGASISFSLTTENSGNYYCTADNGLGAKP |
| | | | SKAVSLSVTVPVSHPVLNLSSPEDLIFEGAKVTLHCEAQRGSLPILYQFHHEGAALERRSANSAGGVAISFSL |
| | | | TAEHSGNYYCTADNGFGPQRSKAVSLSVTVPVSHPVLTLSSAEALTFEGATVTLHCEVQRGSPQILYQFYHED |
| | | | MPLWSSSTPSVGRVSFSFSLTEGHSGNYYCTADNGFGPQRSEVVSLFVTVPVSRPILTLRVPRAQAVVGDLLE |
| | | | LHCEAPRGSPPILYWFYHEDVTLGSSSAPSGGEASFNLSLTAEHSGNYSCEANNGLVAQHSDTISLSVIVPVS |
| | | | RPILTFRAPRAQAVVGDLLELHCEALRGSSPILYWFYHEDVTLGKISAPSGGGASFNLSLTTEHSGIYSCEAD |
| | | | NGLEAQRSEMVTLKVAVPVSRPVLTLRAPGTHAAVGDLLELHCEALRGSPLILYRFFHEDVTLGNRSSPSGGA |
| | | | SLNLSLTAEHSGNYSCEADNGLGAQRSETVTLYITGLTANRSGPFATGVAGGLLSIAGLAAGALLLYCWLSRK |
| | | | AGRKPASDPARSPSDSDSQEPTYHNVPAWEELQPVYTNANPRGENVVYSEVRIIQEKKKHAVASDPRHLRNKG |
| | | | SPIIYSEVKVASTPVSGSLFLASSAPHR |
| human LIRB2 | Q8N423 | 16 | MLLWSLLVIFDAVTEQADSLTLVAPSSVFEGDSIVLKCQGEQNWKIQKMAYHKDNKELSVFKKFSDFLIQSAV |
| | | | LSDSGNYFCSTKGQLFLWDKTSNIVKIKVQELFQRPVLTASSFQPIEGGPVSLKCETRLSPQRLDVQLQFCFF |
| | | | RENQVLGSGWSSSPELQISAVWSEDTGSYWCKAETVTHRIRKQSLQSQIHVQRIPISNVSLEIRAPGGQVTEG |
| | | | QKLILLCSVAGGTGNVTFSWYREATGTSMGKKTQRSLSAELEIPAVKESDAGKYYCRADNGHVPIQSKVVNIP |
| | | | VRIPVSRPVLTLRSPGAQAAVGDLLELHCEALRGSPPILYQFYHEDVTLGNSSAPSGGGASFNLSLTAEHSGN |
| | | | YSCEANNGLGAQCSEAVPVSISGPDGYRRDLMTAGVLWGLFGVLGFTGVALLLYALFHKISGESSATNEPRGA |
| | | | SRPNPQEFTYSSPTPDMEELQPVYVNVGSVDVDVVYSQVWSMQQPESSANIRTLLENKDSQVIYSSVKKS |
| human SIGL5 | O15389 | 17 | MLPRLLLLICAPLCEPAELFLIASPSHPTEGSPVTLTCKMPFLQSSDAQFQFCFFRDTRALGPGWSSSPKLQI |
| | | | AAMWKEDTGSYWCEAQTMASKVLRSRRSQINVHRVPVADVSLETQPPGGQVMEGDRLVLICSVAMGTGDITFL |
| | | | WYKGAVGLNLQSKTQRSLTAEYEIPSVRESDAEQYYCVAENGYGPSPSGLVSITVRIPVSRPILMLRAPRAQA |
| | | | AVEDVLELHCEALRGSPPILYWFYHEDITLGSRSAPSGGGASFNLSLTEEHSGNYSCEANNGLGAQRSEAVTL |
| | | | NFTVPTGARSNHLTSGVIEGLLSTLGPATVALLFCYGLKRKIGRRSARDPLRSLPSPLPQEFTYLNSPTPGQL |
| | | | QPIYENVNVVSGDEVYSLAYYNQPEQESVAAETLGTHMEDKVSLDIYSRLRKANITDVDYEDAM |
| human FCRL4 | Q96PJ5 | 18 | MLLLLLLLPPLLCGRVGAKEQKDYLLTMQKSVTVQEGLCVSVLCSFSYPQNGWTASDPVHGYWFRAGDHVSRN |
| | | | IPVATNNPARAVQEETRDRFHLLGDPQNKDCTLSIRDTRESDAGTYVFCVERGNMKWNYKYDQLSVNVTASQD |
| | | | LLSRYRLEVPESVTVQEGLCVSVPCSVLYPHYNWTASSPVYGSWFKEGADIPWDIPVATNTPSGKVQEDTHGR |
| | | | FLLLGDPQTNNCSLSIRDARKGDSGKYYFQVERGSRKWNYIYDKLSVHVTALTHMPTFSIPGTLESGHPRNLT |
| | | | CSVPWACEQGTPPTITWMGASVSSLDPTITRSSMLSLIPQPQDHGTSLTCQVTLPGAGVTMTRAVRLNISYPP |
| | | | QNLTMTVFQGDGTASTTLRNGSALSVLEGQSLHLVCAVDSNPPARLSWTWGSLTLSPSQSSNLGVLELPRVHV |
| | | | KDEGEFTCRAQNPLGSQHISLSLSLQNEYTGKMRPISGVTLGAFGGAGATALVFLYFCIIFVVVRSCRKKSAR |
| | | | PAVGVGDTGMEDANAVRGSASQGPLIESPADDSPPHHAPPALATPSPEEGEIQYASLSFHKARPQYPQEQEAI |
| | | | GYEYSEINIPK |
| human PECA1 | P16284 | 19 | MLLWLLLLILTPGREQSGVAPKAVLLLNPPWSTAFKGEKVALICSSISHSLAQGDTYWYHDEKLLKIKHDKIQ |
| | | | ITEPGNYQCKTRGSSLSDAVHVEFSPDWLILQALHPVFEGDNVILRCQGKDNKNTHQKVYYKDGKQLPNSYNL |
| | | | EKITVNSVSRDNSKYHCTAYRKFYILDIEVTSKPLNIQVQELFLHPVLRASSSTPIEGSPMTLTCETQLSPQR |
| | | | PDVQLQFSLFRDSQTLGLGWSRSPRLQIPAMWTEDSGSYWCEVETVTHSIKKRSLRSQIRVQRVPVSNVNLEI |
| | | | RPTGGQLIEGENMVLICSVAQGSGTVTFSWHKEGRVRSLGRKTQRSLLAELHVLTVKESDAGRYYCAADNVHS |
| | | | PILSTWIRVTVRIPVSHPVLTFRAPRAHTVVGDLLELHCESLRGSPPILYRFYHEDVTLGNSSAPSGGGASFN |
| | | | LSLTAEHSGNYSCDADNGLGAQHSHGVSLRVTVPVSRPVLTLRAPGAQAVVGDLLELHCESLRGSFPILYWFY |
| | | | HEDDTLGNISAHSGGGASFNLSLTTEHSGNYSCEADNGLGAQHSKVVTLNVTGTSRNRTGLTAAGITGLVLSI |
| | | | LVLAAAAALLHYARARRKPGGLSATGTSSHSPSECQEPSSSRPSRIDPQEPTHSKPLAPMELEPMYSNVNPGD |
| | | | SNPIYSQIWSIQHTKENSANCPMMHQEHEELTVLYSELKKTHPDDSAGEASSRGRAHEEDDEENYENVPRVLL |
| | | | ASDH |
| human SIGL9 | Q9Y336 | 20 | MAASAGAGAVIAAPDSRRWLWSVLAAALGLLTAGVSALEVYTPKEIFVANGTQGKLTCKFKSTSTTGGLTSVS |
| | | | WSFQPEGADTTVSFFHYSQGQVYLGNYPPFKDRISWAGDLDKKDASINIENMQFIHNGTYICDVKNPPDIVVQ |
| | | | PGHIRLYVVEKENLPVFPVWVVVGIVTAVVLGLTLLISMILAVLYRRKNSKRDYTGCSTSESLSPVKQAPRKS |
| | | | PSDTEGLVKSLPSGSHQGPVIYAQLDHSGGHHSDKINKSESVVYADIRKN |
| human SIGL6 | O43699 | 21 | MGRPLLLPLLPLLLPPAFLQPSGSTGSGPSYLYGVTQPKHLSASMGGSVEIPFSFYYPWELATAPDVRISWRR |
| | | | GHFHRQSFYSTRPPSIHKDYVNRLFLNWTEGQKSGFLRISNLQKQDQSVYFCRVELDTRSSGRQQWQSIEGTK |
| | | | LSITQAVTTTTQRPSSMTTTWRLSSTTTTTGLRVTQGKRRSDSWHISLETAVGVAVAVTVLGIMILGLICLLR |
| | | | WRRRKGQQRTKATTPAREPFQNTEEPYENIRNEGQNTDPKLNPKDDGIVYASLALSSSTSPRAPPSHRPLKSP |
| | | | QNETLYSVLKA |
| human CD33 | P20138 | 22 | MARAMAAAWPLLLVALLVLSWPPPGTGDVVVQAPTQVPGFLGDSVTLPCYLQVPNMEVTHVSQLTWARHGESG |
| | | | SMAVFHQTQGPSYSESKRLEFVAARLGAELRNASLRMFGLRVEDEGNYTCLFVTFPQGSRSVDIWLRVLAKPQ |
| | | | NTAEVQKVQLTGEPVPMARCVSTGGRPPAQITWHSDLGGMPNTSQVPGFLSGTVTVTSLWILVPSSQVDGKNV |
| | | | TCKVEHESFEKPQLLTVNLTVYYPPEVSISGYDNNWYLGQNEATLTCDARSNPEPTGYNWSTTMGPLPPFAVA |
| | | | QGAQLLIRPVDKPINTTLICNVTNALGARQAELTVQVKEGPPSEHSGISRNAIIFLVLGILVFLILLGIGIYF |
| | | | YWSKCSREVLWHCHLCPSSTEHASASANGHVSYSAVSRENSSSQDPQTEGTR |
| human FCRL5 | Q96RD9 | 23 | MVPGQAQPQSPEMLLLPLLLPVLGAGSLNKDPSYSLQVQRQVPVPEGLCVIVSCNLSYPRDGWDESTAAYGYW |
| | | | FKGRTSPKTGAPVATNNQSREVEMSTRDRFQLTGDPGKGSCSLVIRDAQREDEAWYFFRVERGSRVRHSFLSN |
| | | | AFFLKVTALTKKPDVYIPETLEPGQPVTVICVFNWAFKKCPAPSFSWTGAALSPRRTRPSTSHFSVLSFTPSP |
| | | | QDHDTDLTCHVDFSRKGVSAQRTVRLRVAYAPKDLIISISHDNTSALELQGNVIYLEVQKGQFLRLLCAADSQ |
| | | | PPATLSWVLQDRVLSSSHPWGPRTLGLELRGVRAGDSGRYTCRAENRLGSQQQALDLSVQYPPENLRVMVSQA |
| | | | NRTVLENLGNGTSLPVLEGQSLRLVCVTHSSPPARLSWTRWGQTVGPSQPSDPGVLELPPIQMEHEGEFTCHA |
| | | | QHPLGSQHVSLSLSVHYPPQLLGPSCSWEAEGLHCSCSSQASPAPSLRWWLGEELEGNSSQGSFEVTPSSAGP |
| | | | WANSSLSLHGGLSSGLRLRCKAWNVHGAQSGSVFQLLPGKLEHGGGLGLGAALGAGVAALLAFCSCLVVFRVK |
| | | | ICRKEARKRAAAEQDVPSTLGPISQGHQHECSAGSSQDHPPPGAATYTPGKGEEQELHYASLSFQGLRLWEPA |
| | | | DQEAPSTTEYSEIKIHTGQPLRGPGFGLQLEREMSGMVPK |
| human FCRL2 | Q96LA5 | 24 | MLLPLLLSSLLGGSQAMDGRFWIRVQESVMVPEGLCISVPCSFSYPRQDWTGSTPAYGYWFKAVTETTKGAPV |
| | | | ATNHQSREVEMSTRGRFQLTGDPAKGNCSLVIRDAQMQDESQYFFRVERGSYVRYNFMNDGFFLKVTALTQKP |
| | | | DVYIPETLEPGQPVTVICVFNWAFEECPPPSFSWTGAALSSQGTKPTTSHFSVLSFTPRPQDHNTDLTCHVDF |
| | | | SRKGVSAQRTVRLRVAYAPRDLVISISRDNTPALEPQPQGNVPYLEAQKGQFLRLLCAADSQPPATLSWVLQN |
| | | | RVLSSSHPWGPRPLGLELPGVKAGDSGRYTCRAENRLGSQQRALDLSVQYPPENLRVMVSQANRTVLENLGNG |
| | | | TSLPVLEGQSLCLVCVTHSSPPARLSWTQRGQVLSPSQPSDPGVLELPRVQVEHEGEFTCHARHPLGSQHVSL |
| | | | SLSVHYSPKLLGPSCSWEAEGLHCSCSSQASPAPSLRWWLGEELLEGNSSQDSFEVTPSSAGPWANSSLSLHG |
| | | | GLSSGLRLRCEAWNVHGAQSGSILQLPDKKGLISTAFSNGAFLGIGITALLFLCLALIIMKILPKRRTQTETP |
| | | | RPRFSRHSTILDYINVVPTAGPLAQKRNQKATPNSPRTPLPPGAPSPESKKNQKKQYQLPSFPEPKSSTQAPE |
| | | | SQESQEELHYATLNFPGVRPRPEARMPKGTQADYAEVKFQ |
| human FCRL1 | Q96LA6 | 25 | MWSHLNRLLFWSIFSSVTCRKAVLDCEAMKTNEFPSPCLDSKTKVVMKGQNVSMFCSHKNKSLQITYSLFRRK |
| | | | THLGTQDGKGEPAIFNLSITEAHESGPYKCKAQVTSCSKYSRDFSFTIVDPVTSPVLNIMVIQTETDRHITLH |
| | | | CLSVNGSLPINYTFFENHVAISPAISKYDREPAEFNLTKKNPGEEEEYRCEAKNRLPNYATYSHPVTMPSTGG |
| | | | DSCPFCLKLLLPGLLLLLVVIILILAFWVLPKYKTRKAMRNNVPRDRGDTAMEVGIYANILEKQAKEESVPEV |
| | | | GSRPCVSTAQDEAKHSQELQYATPVFQEVAPREQEACDSYKSGYVYSELNF |
| human SIG12 | Q96PQ1 | 26 | MIPTFTALLCLGLSLGPRTHMQAGPLPKPTLWAEPGSVISWGNSVTIWCQGTLEAREYRLDKEESPAPWDRQN |
| | | | PLEPKNKARFSIPSMTEDYAGRYRCYYRSPVGWSQPSDPLELVMTGAYSKPTLSALPSPLVTSGKSVTLLCQS |
| | | | RSPMDTFLLIKERAAHPLLHLRSEHGAQQHQAEFPMSPVTSVHGGTYRCFSSHGFSHYLLSHPSDPLELIVSG |
| | | | SLEDPRPSPTRSVSTAAGPEDQPLMPTGSVPHSGLRRHWEVLIGVLVVSILLLSLLLFLLLQHWRQGKHRTLA |
| | | | QRQADFQRPPGAAEPEPKDGGLQRRSSPAADVQGENFCAAVKNTQPEDGVEMDTRQSPHDEDPQAVTYAKVKH |
| | | | SRPRREMASPPSPLSGEFLDTKDRQAEEDRQMDTEAAASEAPQDVTYAQLHSFTLRQKATEPPPSQEGASPAE |
| | | | PSVYATLAIH |
| human FCRL3 | Q96P31 | 27 | MTPALTALLCLGLSLGPRTRVQAGPFPKPTLWAEPGSVISWGSPVTIWCQGSQEAQEYRLHKEGSPEPLDRNN |
| | | | PLEPKNKARFSIPSMTEHHAGRYRCHYYSSAGWSEPSDPLEMVMTGAYSKPTLSALPSPVVASGGNMTLRCGS |
| | | | QKGYHHFVLMKEGEHQLPRTLDSQQLHSRGFQALFPVGPVTPSHRWRFTCYYYYTNTPWVWSHPSDPLEILPS |
| | | | GVSRKPSLLTLQGPVLAPGQSLTLQCGSDVGYNRFVLYKEGERDFLQRPGQQPQAGLSQANFTLGPVSPSNGG |
| | | | QYRCYGAHNLSSEWSAPSDPLNILMAGQIYDTVSLSAQPGPTVASGENVTLLCQSWWQFDTFLLTKEGAAHPP |
| | | | LRLRSMYGAHKYQAEFPMSPVTSAHAGTYRCYGSYSSNPHLLSHPSEPLELVVSGHSGGSSLPPTGPPSTPGL |
| | | | GRYLEVLIGVSVAFVLLLFLLLFLLLRRQRHSKHRTSDQRKTDFQRPAGAAETEPKDRGLLRRSSPAADVQEE |
| | | | NLYAAVKDTQSEDRVELDSQSPHDEDPQAVTYAPVKHSSPRREMASPPSSLSGEFLDTKDRQVEEDRQMDTEA |
| | | | AASEASQDVTYAQLHSLTLRRKATEPPPSQEGEPPAEPSIYATLAIH |
| human MPZL1 | O95297 | 28 | MSLMVVSMACVGFFLLEGPWPHVGGQDKPFLSAWPGTVVSEGQHVTLQCRSRLGFNEFSLSKEDGMPVPELYN |
| | | | RIFRNSFLMGPVTPAHAGTYRCCSSHPHSPTGWSAPSNPVVIMVTGVHRKPSLLAHPGPLVKSGETVILQCWS |
| | | | DVRFERFLLHREGITEDPLRLVGQLHDAGSQVNYSMGPMTPALAGTYRCFGSVTHLPYELSAPSDPLDIVVVG |
| | | | LYGKPSLSAQPGPTVQAGENVTLSCSSRSLFDIYHLSREAEAGELRLTAVLRVNGTFQANFPLGPVTHGGNYR |
| | | | CFGSFRALPHAWSDPSDPLPVSVTGNSRHLHVLIGTSVVIIPFAILLFFLLHRWCANKKNAVVMDQEPAGNRT |
| | | | VNREDSDEQDPQEVTYAQLNHCVFTQRKITRPSQRPKTPPTDTSV |
| human PILRA | Q9UKJ1 | 29 | MLLLLLLLPLLWGTKGMEGDRQYGDGYLLQVQELVTVQEGLCVHVPCSFSYPQDGWTDSDPVHGYWFRAGDRP |
| | | | YQDAPVATNNPDREVQAETQGRFQLLGDIWSNDCSLSIRDARKRDKGSYFFRLERGSMKWSYKSQLNYKTKQL |
| | | | SVFVTALTHRPDILILGTLESGHSRNLTCSVPWACKQGTPPMISWIGASVSSPGPTTARSSVLTLTPKPQDHG |
| | | | TSLTCQVTLPGTGVTTTSTVRLDVSYPPWNLTMTVFQGDATASTALGNGSSLSVLEGQSLRLVCAVNSNPPAR |
| | | | LSWTRGSLTLCPSRSSNPGLLELPRVHVRDEGEFTCRAQNAQGSQHISLSLSLQNEGTGTSRPVSQVTLAAVG |
| | | | GAGATALAFLSFCIIFIIVRSCRKKSARPAAGVGDTGMEDAKAIRGSASQGPLTESWKDGNPLKKPPPAVAPS |
| | | | SGEEGELHYATLSFHKVKPQDPQGQEATDSEYSEIKIHKRETAETQACLRNHNPSSKEVRG |
| human PVR | P15151 | 30 | MLLLLLLPLLWGRERVEGQKSNRKDYSLTMQSSVTVQEGMCVHVRCSFSYPVDSQTDSDPVHGYWFRAGNDIS |
| | | | WKAPVATNNPAWAVQEETRDRFHLLGDPQTKNCTLSIRDARMSDAGRYFFRMEKGNIKWNYKYDQLSVNVTAL |
| | | | THRPNILIPGTLESGCFQNLTCSVPWACEQGTPPMISWMGTSVSPLHPSTTRSSVLTLIPQPQHHGTSLTCQV |
| | | | TLPGAGVTTNRTIQLNVSYPPQNLTVTVFQGEGTASTALGNSSSLSVLEGQSLRLVCAVDSNPPARLSWTWRS |
| | | | LTLYPSQPSNPLVLELQVHLGDEGEFTCRAQNSLGSQHVSLNLSLQQEYTGKMRPVSGVLLGAVGGAGATALV |
| | | | FLSFCVIFIVVRSCRKKSARPAADVGDIGMKDANTIRGSASQGNLTESWADDNPRHHGLAAHSSGEEREIQYA |
| | | | PLSFHKGEPQDLSGQEATNNEYSEIKIPK |
| human SIG11 | Q96RL6 | 31 | MTLTLSVLICLGLSVGPRTCVQAGTLPKPTLWAEPASVIARGKPVTLWCQGPLETEEYRLDKEGLPWARKRQN |
| | | | PLEPGAKAKFHIPSTVYDSAGRYRCYYETPAGWSEPSDPLELVATGFYAEPTLLALPSPVVASGGNVTLQCDT |
| | | | LDGLLTFVLVEEEQKLPRTLYSQKLPKGPSQALFPVGPVTPSCRWRFRCYYYYRKNPQVWSNPSDLLEILVPG |
| | | | VSRKPSLLIPQGSVVARGGSLTLQCRSDVGYDIFVLYKEGEHDLVQGSGQQPQAGLSQANFTLGPVSRSHGGQ |
| | | | YRCYGAHNLSPRWSAPSDPLDILIAGLIPDIPALSVQPGPKVASGENVTLLCQSWHQIDTFFLTKEGAAHPPL |
| | | | CLKSKYQSYRHQAEFSMSPVTSAQGGTYRCYSAIRSYPYLLSSPSYPQELVVSGPSGDPSLSPTGSTPTPGPE |
| | | | DQPLTPTGLDPQSGLGRHLGVVTGVSVAFVLLLFLLLFLLLRHRHQSKHRTSAHFYRPAGAAGPEPKDQGLQK |
| | | | RASPVADIQEEILNAAVKDTQPKDGVEMDARAAASEAPQDVTYAQLHSLTLRREATEPPPSQEREPPAEPSIY |
| | | | APLAIH |
| human SIG10 | Q96LC7 | 32 | MTPIVTVLICLGLSLGPRTHVQTGTIPKPTLWAEPDSVITQGSPVTLSCQGSLEAQEYRLYREKKSASWITRI |
| | | | RPELVKNGQFHIPSITWEHTGRYGCQYYSRARWSELSDPLVLVMTGAYPKPTLSAQPSPVVTSGGRVTLQCES |
| | | | QVAFGGFILCKEGEEEHPQCLNSQPHARGSSRAIFSVGPVSPNRRWSHRCYGYDLNSPYVWSSPSDLLELLVP |
| | | | GVSKKPSLSVQPGPVVAPGESLTLQCVSDVGYDRFVLYKEGERDLRQLPGRQPQAGLSQANFTLGPVSRSYGG |
| | | | QYRCYGAHNLSSECSAPSDPLDILITGQIRGTPFISVQPGPTVASGENVTLLCQSWRQFHTFLLTKAGAADAP |
| | | | LRLRSIHEYPKYQAEFPMSPVTSAHAGTYRCYGSLNSDPYLLSHPSEPLELVVSGPSMGSSPPPTGPISTPAG |
| | | | PEDQPLTPTGSDPQSGLGRHLGVVIGILVAVVLLLLLLLLLFLILRHRRQGKHWTSTQRKADFQHPAGAVGPE |
| | | | PTDRGLQWRSSPAADAQEENLYAAVKDTQPEDGVEMDTRAAASEAPQDVTYAQLHSLTLRRKATEPPPSQERE |
| | | | PPAEPSIYATLAIH |

TABLE 2
Example of N-CARs according to the invention

| Plasmid encoding | | | | | | | Amino acids of the |
|---|---|---|---|---|---|---|---|
| N-CAR | signal peptide | GS linker 1 | VH chain | GS linker | VL chain | GS linker 2 | inhibitory polypeptide used |
| pCLS27446 | SEQ ID | SEQ ID | SEQ ID | SEQ ID | SEQ ID | SEQ ID | 229-325 of SEQ ID NO. 36 |
| (SEQ ID NO. 100) | NO. 37 | NO. 39 | NO. 41 | NO. 38 | NO. 42 | NO. 40 | |
| pCLS27447 | SEQ ID | SEQ ID | SEQ ID | SEQ ID | SEQ ID | SEQ ID | 230-468 of SEQ ID NO. 34 |
| (SEQ ID NO. 101) | NO. 37 | NO. 39 | NO. 41 | NO. 38 | NO. 42 | NO. 40 | |
| pCLS27448 | SEQ ID | SEQ ID | SEQ ID | SEQ ID | SEQ ID | SEQ ID | 179-440 of SEQ ID NO. 35 |
| (SEQ ID NO. 102) | NO. 37 | NO. 39 | NO. 41 | NO. 38 | NO. 42 | NO. 40 | |
| pCLS27449 | SEQ ID | SEQ ID | SEQ ID | SEQ ID | SEQ ID | SEQ ID | 181-386 of SEQ ID NO. 33 |
| (SEQ ID NO. 103) | NO. 37 | NO. 39 | NO. 41 | NO. 38 | NO. 42 | NO. 40 | |
| pCLS27450 | SEQ ID | SEQ ID | SEQ ID | SEQ ID | SEQ ID | SEQ ID | 229-364 of SEQ ID NO. 22 |
| (SEQ ID NO. 104) | NO. 37 | NO. 39 | NO. 41 | NO. 38 | NO. 42 | NO. 40 | |
| pCLS27451 | SEQ ID | SEQ ID | SEQ ID | SEQ ID | SEQ ID | SEQ ID | 214-310 of SEQ ID NO. 3 |
| (SEQ ID NO. 105) | NO. 37 | NO. 39 | NO. 41 | NO. 38 | NO. 42 | NO. 40 | |
| pCLS27452 | SEQ ID | SEQ ID | SEQ ID | SEQ ID | SEQ ID | SEQ ID | 292-429 of SEQ ID NO. 25 |
| (SEQ ID NO. 106) | NO. 37 | NO. 39 | NO. 41 | NO. 38 | NO. 42 | NO. 40 | |
| pCLS27453 | SEQ ID | SEQ ID | SEQ ID | SEQ ID | SEQ ID | SEQ ID | 388-508 of SEQ ID NO. 24 |
| (SEQ ID NO. 107) | NO. 37 | NO. 39 | NO. 41 | NO. 38 | NO. 42 | NO. 40 | |
| pCLS27454 | SEQ ID | SEQ ID | SEQ ID | SEQ ID | SEQ ID | SEQ ID | 564-734 of SEQ ID NO. 27 |
| (SEQ ID NO. 108) | NO. 37 | NO. 39 | NO. 41 | NO. 38 | NO. 42 | NO. 40 | |
| pCLS27455 | SEQ ID | SEQ ID | SEQ ID | SEQ ID | SEQ ID | SEQ ID | 375-515 of SEQ ID NO. 18 |
| (SEQ ID NO. 109) | NO. 37 | NO. 39 | NO. 41 | NO. 38 | NO. 42 | NO. 40 | |
| pCLS27456 | SEQ ID | SEQ ID | SEQ ID | SEQ ID | SEQ ID | SEQ ID | 753-977 of SEQ ID NO. 23 |
| (SEQ ID NO. 110) | NO. 37 | NO. 39 | NO. 41 | NO. 38 | NO. 42 | NO. 40 | |
| pCLS27457 | SEQ ID | SEQ ID | SEQ ID | SEQ ID | SEQ ID | SEQ ID | 420-598 of SEQ ID NO. 16 |
| (SEQ ID NO. 111) | NO. 37 | NO. 39 | NO. 41 | NO. 38 | NO. 42 | NO. 40 | |
| pCLS27445 | SEQ ID | SEQ ID | SEQ ID | SEQ ID | SEQ ID | SEQ ID | 420-631 of SEQ ID NO. 11 |
| (SEQ ID NO. 112) | NO. 37 | NO. 39 | NO. 41 | NO. 38 | NO. 42 | NO. 40 | |
| pCLS27458 | SEQ ID | SEQ ID | SEQ ID | SEQ ID | SEQ ID | SEQ ID | 219-448 of SEQ ID NO. 10 |
| (SEQ ID NO. 113) | NO. 37 | NO. 39 | NO. 41 | NO. 38 | NO. 42 | NO. 40 | |
| pCLS27459 | SEQ ID | SEQ ID | SEQ ID | SEQ ID | SEQ ID | SEQ ID | 419-590 of SEQ ID NO. 15 |
| (SEQ ID NO. 114) | NO. 37 | NO. 39 | NO. 41 | NO. 38 | NO. 42 | NO. 40 | |
| pCLS27460 | SEQ ID | SEQ ID | SEQ ID | SEQ ID | SEQ ID | SEQ ID | 214-343 of SEQ ID NO. 9 |
| (SEQ ID NO. 115) | NO. 37 | NO. 39 | NO. 41 | NO. 38 | NO. 42 | NO. 40 | |
| pCLS27461 | SEQ ID | SEQ ID | SEQ ID | SEQ ID | SEQ ID | SEQ ID | 147-269 of SEQ ID NO. 28 |
| (SEQ ID NO. 116) | NO. 37 | NO. 39 | NO. 41 | NO. 38 | NO. 42 | NO. 40 | |
| pCLS27462 | SEQ ID | SEQ ID | SEQ ID | SEQ ID | SEQ ID | SEQ ID | 151-303 of SEQ ID NO. 29 |
| (SEQ ID NO. 117) | NO. 37 | NO. 39 | NO. 41 | NO. 38 | NO. 42 | NO. 40 | |
| pCLS27464 | SEQ ID | SEQ ID | SEQ ID | SEQ ID | SEQ ID | SEQ ID | 329-417 of SEQ ID NO. 30 |
| (SEQ ID NO. 118) | NO. 37 | NO. 39 | NO. 41 | NO. 38 | NO. 42 | NO. 40 | |
| pCLS27465 | SEQ ID | SEQ ID | SEQ ID | SEQ ID | SEQ ID | SEQ ID | 442-697 of SEQ ID NO. 32 |
| (SEQ ID NO. 119) | NO. 37 | NO. 39 | NO. 41 | NO. 38 | NO. 42 | NO. 40 | |
| pCLS27466 | SEQ ID | SEQ ID | SEQ ID | SEQ ID | SEQ ID | SEQ ID | 453-698 of SEQ ID NO. 31 |
| (SEQ ID NO. 120) | NO. 37 | NO. 39 | NO. 41 | NO. 38 | NO. 42 | NO. 40 | |
| pCLS27467 | SEQ ID | SEQ ID | SEQ ID | SEQ ID | SEQ ID | SEQ ID | 463-595 of SEQ ID NO. 26 |
| (SEQ ID NO. 121) | NO. 37 | NO. 39 | NO. 41 | NO. 38 | NO. 42 | NO. 40 | |
| pCLS27468 | SEQ ID | SEQ ID | SEQ ID | SEQ ID | SEQ ID | SEQ ID | 331-551 of SEQ ID NO. 17 |
| (SEQ ID NO. 122) | NO. 37 | NO. 39 | NO. 41 | NO. 38 | NO. 42 | NO. 40 | |
| pCLS27469 | SEQ ID | SEQ ID | SEQ ID | SEQ ID | SEQ ID | SEQ ID | 334-453 of SEQ ID NO. 21 |
| (SEQ ID NO. 123) | NO. 37 | NO. 39 | NO. 41 | NO. 38 | NO. 42 | NO. 40 | |
| pCLS27470 | SEQ ID | SEQ ID | SEQ ID | SEQ ID | SEQ ID | SEQ ID | 337-467 of SEQ ID NO. 14 |
| (SEQ ID NO. 124) | NO. 37 | NO. 39 | NO. 41 | NO. 38 | NO. 42 | NO. 40 | |
| pCLS27471 | SEQ ID | SEQ ID | SEQ ID | SEQ ID | SEQ ID | SEQ ID | 345-499 of SEQ ID NO. 13 |
| (SEQ ID NO. 125) | NO. 37 | NO. 39 | NO. 41 | NO. 38 | NO. 42 | NO. 40 | |
| pCLS27472 | SEQ ID | SEQ ID | SEQ ID | SEQ ID | SEQ ID | SEQ ID | 237-463 of SEQ ID NO. 20 |
| (SEQ ID NO. 126) | NO. 37 | NO. 39 | NO. 41 | NO. 38 | NO. 42 | NO. 40 | |
| pCLS27473 | SEQ ID | SEQ ID | SEQ ID | SEQ ID | SEQ ID | SEQ ID | 206-348 of SEQ ID NO. 2 |
| (SEQ ID NO. 127) | NO. 37 | NO. 39 | NO. 41 | NO. 38 | NO. 42 | NO. 40 | |
| pCLS27474 | SEQ ID | SEQ ID | SEQ ID | SEQ ID | SEQ ID | SEQ ID | 206-348 of SEQ ID NO. 1 |
| (SEQ ID NO. 128) | NO. 37 | NO. 39 | NO. 41 | NO. 38 | NO. 42 | NO. 40 | |
| pCLS27475 | SEQ ID | SEQ ID | SEQ ID | SEQ ID | SEQ ID | SEQ ID | 206-341 of SEQ ID NO. 4 |
| (SEQ ID NO. 129) | NO. 37 | NO. 39 | NO. 41 | NO. 38 | NO. 42 | NO. 40 | |
| pCLS27476 | SEQ ID | SEQ ID | SEQ ID | SEQ ID | SEQ ID | SEQ ID | 203-377 of SEQ ID NO. 6 |
| (SEQ ID NO. 130) | NO. 37 | NO. 39 | NO. 41 | NO. 38 | NO. 42 | NO. 40 | |
| pCLS27477 | SEQ ID | SEQ ID | SEQ ID | SEQ ID | SEQ ID | SEQ ID | 201-375 of SEQ ID NO. 8 |
| (SEQ ID NO. 131) | NO. 37 | NO. 39 | NO. 41 | NO. 38 | NO. 42 | NO. 40 | |
| pCLS27478 | SEQ ID | SEQ ID | SEQ ID | SEQ ID | SEQ ID | SEQ ID | 301-444 of SEQ ID NO. 7 |
| (SEQ ID NO. 132) | NO. 37 | NO. 39 | NO. 41 | NO. 38 | NO. 42 | NO. 40 | |
| pCLS27479 | SEQ ID | SEQ ID | SEQ ID | SEQ ID | SEQ ID | SEQ ID | 301-455 of SEQ ID NO. 5 |
| (SEQ ID NO. 133) | NO. 37 | NO. 39 | NO. 41 | NO. 38 | NO. 42 | NO. 40 | |
| pCLS27480 | SEQ ID | SEQ ID | SEQ ID | SEQ ID | SEQ ID | SEQ ID | 296-410 of SEQ ID NO. 12 |
| (SEQ ID NO. 134) | NO. 37 | NO. 39 | NO. 41 | NO. 38 | NO. 42 | NO. 40 | |
| pCLS27481 | SEQ ID | SEQ ID | SEQ ID | SEQ ID | SEQ ID | SEQ ID | 592-738 of SEQ ID NO. 19 |
| (SEQ ID NO. 135) | NO. 37 | NO. 39 | NO. 41 | NO. 38 | NO. 42 | NO. 40 | |
| pCLS27482 | SEQ ID | SEQ ID | SEQ ID | SEQ ID | SEQ ID | SEQ ID | 229-325 of SEQ ID NO. 36 |
| (SEQ ID NO. 138) | NO. 37 | NO. 39 | NO. 43 | NO. 38 | NO. 44 | NO. 40 | |
| pCLS27483 | SEQ ID | SEQ ID | SEQ ID | SEQ ID | SEQ ID | SEQ ID | 230-468 of SEQ ID NO. 34 |
| (SEQ ID NO. 139) | NO. 37 | NO. 39 | NO. 43 | NO. 38 | NO. 44 | NO. 40 | |
| pCLS27484 | SEQ ID | SEQ ID | SEQ ID | SEQ ID | SEQ ID | SEQ ID | 179-440 of SEQ ID NO. 35 |
| (SEQ ID NO. 140) | NO. 37 | NO. 39 | NO. 43 | NO. 38 | NO. 44 | NO. 40 | |
| pCLS27485 | SEQ ID | SEQ ID | SEQ ID | SEQ ID | SEQ ID | SEQ ID | 181-386 of SEQ ID NO. 33 |
| (SEQ ID NO. 141) | NO. 37 | NO. 39 | NO. 43 | NO. 38 | NO. 44 | NO. 40 | |
| pCLS27486 | SEQ ID | SEQ ID | SEQ ID | SEQ ID | SEQ ID | SEQ ID | 229-364 of SEQ ID NO. 22 |
| (SEQ ID NO. 142) | NO. 37 | NO. 39 | NO. 43 | NO. 38 | NO. 44 | NO. 40 | |
| pCLS27487 | SEQ ID | SEQ ID | SEQ ID | SEQ ID | SEQ ID | SEQ ID | 214-310 of SEQ ID NO. 3 |
| (SEQ ID NO. 143) | NO. 37 | NO. 39 | NO. 43 | NO. 38 | NO. 44 | NO. 40 | |
| pCLS27488 | SEQ ID | SEQ ID | SEQ ID | SEQ ID | SEQ ID | SEQ ID | 292-429 of SEQ ID NO. 25 |
| (SEQ ID NO. 144) | NO. 37 | NO. 39 | NO. 43 | NO. 38 | NO. 44 | NO. 40 | |
| pCLS27489 | SEQ ID | SEQ ID | SEQ ID | SEQ ID | SEQ ID | SEQ ID | 388-508 of SEQ ID NO. 24 |
| (SEQ ID NO. 145) | NO. 37 | NO. 39 | NO. 43 | NO. 38 | NO. 44 | NO. 40 | |
| pCLS27490 | SEQ ID | SEQ ID | SEQ ID | SEQ ID | SEQ ID | SEQ ID | 564-734 of SEQ ID NO. 27 |
| (SEQ ID NO. 146) | NO. 37 | NO. 39 | NO. 43 | NO. 38 | NO. 44 | NO. 40 | |
| pCLS27491 | SEQ ID | SEQ ID | SEQ ID | SEQ ID | SEQ ID | SEQ ID | 375-515 of SEQ ID NO. 18 |
| (SEQ ID NO. 147) | NO. 37 | NO. 39 | NO. 43 | NO. 38 | NO. 44 | NO. 40 | |
| pCLS27492 | SEQ ID | SEQ ID | SEQ ID | SEQ ID | SEQ ID | SEQ ID | 753-977 of SEQ ID NO. 23 |
| (SEQ ID NO. 148) | NO. 37 | NO. 39 | NO. 43 | NO. 38 | NO. 44 | NO. 40 | |
| pCLS27493 | SEQ ID | SEQ ID | SEQ ID | SEQ ID | SEQ ID | SEQ ID | 420-598 of SEQ ID NO. 16 |
| (SEQ ID NO. 149) | NO. 37 | NO. 39 | NO. 43 | NO. 38 | NO. 44 | NO. 40 | |
| pCLS27494 | SEQ ID | SEQ ID | SEQ ID | SEQ ID | SEQ ID | SEQ ID | 420-631 of SEQ ID NO. 11 |
| (SEQ ID NO. 150) | NO. 37 | NO. 39 | NO. 43 | NO. 38 | NO. 44 | NO. 40 | |
| pCLS27495 | SEQ ID | SEQ ID | SEQ ID | SEQ ID | SEQ ID | SEQ ID | 219-448 of SEQ ID NO. 10 |
| (SEQ ID NO. 151) | NO. 37 | NO. 39 | NO. 43 | NO. 38 | NO. 44 | NO. 40 | |
| pCLS27496 | SEQ ID | SEQ ID | SEQ ID | SEQ ID | SEQ ID | SEQ ID | 419-590 of SEQ ID NO. 15 |
| (SEQ ID NO. 152) | NO. 37 | NO. 39 | NO. 43 | NO. 38 | NO. 44 | NO. 40 | |
| pCLS27497 | SEQ ID | SEQ ID | SEQ ID | SEQ ID | SEQ ID | SEQ ID | 214-343 of SEQ ID NO. 9 |
| (SEQ ID NO. 153) | NO. 37 | NO. 39 | NO. 43 | NO. 38 | NO. 44 | NO. 40 | |
| pCLS27498 | SEQ ID | SEQ ID | SEQ ID | SEQ ID | SEQ ID | SEQ ID | 147-269 of SEQ ID NO. 28 |
| (SEQ ID NO. 154) | NO. 37 | NO. 39 | NO. 43 | NO. 38 | NO. 44 | NO. 40 | |
| pCLS27499 | SEQ ID | SEQ ID | SEQ ID | SEQ ID | SEQ ID | SEQ ID | 151-303 of SEQ ID NO. 29 |
| (SEQ ID NO. 155) | NO. 37 | NO. 39 | NO. 43 | NO. 38 | NO. 44 | NO. 40 | |
| pCLS27501 | SEQ ID | SEQ ID | SEQ ID | SEQ ID | SEQ ID | SEQ ID | 329-417 of SEQ ID NO. 30 |
| (SEQ ID NO. 156) | NO. 37 | NO. 39 | NO. 43 | NO. 38 | NO. 44 | NO. 40 | |
| pCLS27502 | SEQ ID | SEQ ID | SEQ ID | SEQ ID | SEQ ID | SEQ ID | 442-697 of SEQ ID NO. 32 |
| (SEQ ID NO. 157) | NO. 37 | NO. 39 | NO. 43 | NO. 38 | NO. 44 | NO. 40 | |
| pCLS27503 | SEQ ID | SEQ ID | SEQ ID | SEQ ID | SEQ ID | SEQ ID | 453-698 of SEQ ID NO. 31 |
| (SEQ ID NO. 158) | NO. 37 | NO. 39 | NO. 43 | NO. 38 | NO. 44 | NO. 40 | |
| pCLS27504 | SEQ ID | SEQ ID | SEQ ID | SEQ ID | SEQ ID | SEQ ID | 463-595 of SEQ ID NO. 26 |
| (SEQ ID NO. 159) | NO. 37 | NO. 39 | NO. 43 | NO. 38 | NO. 44 | NO. 40 | |
| pCLS27505 | SEQ ID | SEQ ID | SEQ ID | SEQ ID | SEQ ID | SEQ ID | 331-551 of SEQ ID NO. 17 |
| (SEQ ID NO. 160) | NO. 37 | NO. 39 | NO. 43 | NO. 38 | NO. 44 | NO. 40 | |
| pCLS27506 | SEQ ID | SEQ ID | SEQ ID | SEQ ID | SEQ ID | SEQ ID | 334-453 of SEQ ID NO. 21 |
| (SEQ ID NO. 161) | NO. 37 | NO. 39 | NO. 43 | NO. 38 | NO. 44 | NO. 40 | |
| pCLS27507 | SEQ ID | SEQ ID | SEQ ID | SEQ ID | SEQ ID | SEQ ID | 337-467 of SEQ ID NO. 14 |
| (SEQ ID NO. 162) | NO. 37 | NO. 39 | NO. 43 | NO. 38 | NO. 44 | NO. 40 | |
| pCLS27508 | SEQ ID | SEQ ID | SEQ ID | SEQ ID | SEQ ID | SEQ ID | 345-499 of SEQ ID NO. 13 |
| (SEQ ID NO. 163) | NO. 37 | NO. 39 | NO. 43 | NO. 38 | NO. 44 | NO. 40 | |
| pCLS27509 | SEQ ID | SEQ ID | SEQ ID | SEQ ID | SEQ ID | SEQ ID | 237-463 of SEQ ID NO. 20 |
| (SEQ ID NO. 164) | NO. 37 | NO. 39 | NO. 43 | NO. 38 | NO. 44 | NO. 40 | |
| pCLS27510 | SEQ ID | SEQ ID | SEQ ID | SEQ ID | SEQ ID | SEQ ID | 206-348 of SEQ ID NO. 2 |
| (SEQ ID NO. 165) | NO. 37 | NO. 39 | NO. 43 | NO. 38 | NO. 44 | NO. 40 | |
| pCLS27511 | SEQ ID | SEQ ID | SEQ ID | SEQ ID | SEQ ID | SEQ ID | 206-348 of SEQ ID NO. 1 |
| (SEQ ID NO. 166) | NO. 37 | NO. 39 | NO. 43 | NO. 38 | NO. 44 | NO. 40 | |
| pCLS27512 | SEQ ID | SEQ ID | SEQ ID | SEQ ID | SEQ ID | SEQ ID | 206-341 of SEQ ID NO. 4 |
| (SEQ ID NO. 167) | NO. 37 | NO. 39 | NO. 43 | NO. 38 | NO. 44 | NO. 40 | |
| pCLS27513 | SEQ ID | SEQ ID | SEQ ID | SEQ ID | SEQ ID | SEQ ID | 203-377 of SEQ ID NO. 6 |
| (SEQ ID NO. 168) | NO. 37 | NO. 39 | NO. 43 | NO. 38 | NO. 44 | NO. 40 | |
| pCLS27514 | SEQ ID | SEQ ID | SEQ ID | SEQ ID | SEQ ID | SEQ ID | 201-375 of SEQ ID NO. 8 |
| (SEQ ID NO. 169) | NO. 37 | NO. 39 | NO. 43 | NO. 38 | NO. 44 | NO. 40 | |
| pCLS27515 | SEQ ID | SEQ ID | SEQ ID | SEQ ID | SEQ ID | SEQ ID | 301-444 of SEQ ID NO. 7 |
| (SEQ ID NO. 170) | NO. 37 | NO. 39 | NO. 43 | NO. 38 | NO. 44 | NO. 40 | |
| pCLS27516 | SEQ ID | SEQ ID | SEQ ID | SEQ ID | SEQ ID | SEQ ID | 301-455 of SEQ ID NO. 5 |
| (SEQ ID NO. 171) | NO. 37 | NO. 39 | NO. 43 | NO. 38 | NO. 44 | NO. 40 | |
| pCLS27517 | SEQ ID | SEQ ID | SEQ ID | SEQ ID | SEQ ID | SEQ ID | 296-410 of SEQ ID NO. 12 |
| (SEQ ID NO. 172) | NO. 37 | NO. 39 | NO. 43 | NO. 38 | NO. 44 | NO. 40 | |
| pCLS27518 | SEQ ID | SEQ ID | SEQ ID | SEQ ID | SEQ ID | SEQ ID | 592-738 of SEQ ID NO. 19 |
| (SEQ ID NO. 173) | NO. 37 | NO. 39 | NO. 43 | NO. 38 | NO. 44 | NO. 40 | |
| pCLS27698 | SEQ ID | SEQ ID | SEQ ID | SEQ ID | SEQ ID | SEQ ID | 229-325 of SEQ ID NO. 36 |
| (SEQ ID NO. 175) | NO. 37 | NO. 39 | NO. 45 | NO. 38 | NO. 46 | NO. 40 | |
| pCLS27699 | SEQ ID | SEQ ID | SEQ ID | SEQ ID | SEQ ID | SEQ ID | 230-468 of SEQ ID NO. 34 |
| (SEQ ID NO. 176) | NO. 37 | NO. 39 | NO. 45 | NO. 38 | NO. 46 | NO. 40 | |
| pCLS27700 | SEQ ID | SEQ ID | SEQ ID | SEQ ID | SEQ ID | SEQ ID | 179-440 of SEQ ID NO. 35 |
| (SEQ ID NO. 177) | NO. 37 | NO. 39 | NO. 45 | NO. 38 | NO. 46 | NO. 40 | |
| pCLS27701 | SEQ ID | SEQ ID | SEQ ID | SEQ ID | SEQ ID | SEQ ID | 181-386 of SEQ ID NO. 33 |
| (SEQ ID NO. 178) | NO. 37 | NO. 39 | NO. 45 | NO. 38 | NO. 46 | NO. 40 | |
| pCLS27702 | SEQ ID | SEQ ID | SEQ ID | SEQ ID | SEQ ID | SEQ ID | 229-364 of SEQ ID NO. 22 |
| (SEQ ID NO. 179) | NO. 37 | NO. 39 | NO. 45 | NO. 38 | NO. 46 | NO. 40 | |
| pCLS27703 | SEQ ID | SEQ ID | SEQ ID | SEQ ID | SEQ ID | SEQ ID | 214-310 of SEQ ID NO. 3 |
| (SEQ ID NO. 180) | NO. 37 | NO. 39 | NO. 45 | NO. 38 | NO. 46 | NO. 40 | |
| pCLS27704 | SEQ ID | SEQ ID | SEQ ID | SEQ ID | SEQ ID | SEQ ID | 292-429 of SEQ ID NO. 25 |
| (SEQ ID NO. 181) | NO. 37 | NO. 39 | NO. 45 | NO. 38 | NO. 46 | NO. 40 | |
| pCLS27705 | SEQ ID | SEQ ID | SEQ ID | SEQ ID | SEQ ID | SEQ ID | 388-508 of SEQ ID NO. 24 |
| (SEQ ID NO. 182) | NO. 37 | NO. 39 | NO. 45 | NO. 38 | NO. 46 | NO. 40 | |
| pCLS27706 | SEQ ID | SEQ ID | SEQ ID | SEQ ID | SEQ ID | SEQ ID | 564-734 of SEQ ID NO. 27 |
| (SEQ ID NO. 183) | NO. 37 | NO. 39 | NO. 45 | NO. 38 | NO. 46 | NO. 40 | |
| pCLS27707 | SEQ ID | SEQ ID | SEQ ID | SEQ ID | SEQ ID | SEQ ID | 375-515 of SEQ ID NO. 18 |
| (SEQ ID NO. 184) | NO. 37 | NO. 39 | NO. 45 | NO. 38 | NO. 46 | NO. 40 | |
| pCLS27708 | SEQ ID | SEQ ID | SEQ ID | SEQ ID | SEQ ID | SEQ ID | 753-977 of SEQ ID NO. 23 |
| (SEQ ID NO. 185) | NO. 37 | NO. 39 | NO. 45 | NO. 38 | NO. 46 | NO. 40 | |
| pCLS27709 | SEQ ID | SEQ ID | SEQ ID | SEQ ID | SEQ ID | SEQ ID | 420-598 of SEQ ID NO. 16 |
| (SEQ ID NO. 186) | NO. 37 | NO. 39 | NO. 45 | NO. 38 | NO. 46 | NO. 40 | |
| pCLS27710 | SEQ ID | SEQ ID | SEQ ID | SEQ ID | SEQ ID | SEQ ID | 420-631 of SEQ ID NO. 11 |
| (SEQ ID NO. 187) | NO. 37 | NO. 39 | NO. 45 | NO. 38 | NO. 46 | NO. 40 | |
| pCLS27711 | SEQ ID | SEQ ID | SEQ ID | SEQ ID | SEQ ID | SEQ ID | 219-448 of SEQ ID NO. 10 |
| (SEQ ID NO. 188) | NO. 37 | NO. 39 | NO. 45 | NO. 38 | NO. 46 | NO. 40 | |
| pCLS27712 | SEQ ID | SEQ ID | SEQ ID | SEQ ID | SEQ ID | SEQ ID | 419-590 of SEQ ID NO. 15 |
| (SEQ ID NO. 189) | NO. 37 | NO. 39 | NO. 45 | NO. 38 | NO. 46 | NO. 40 | |
| pCLS27713 | SEQ ID | SEQ ID | SEQ ID | SEQ ID | SEQ ID | SEQ ID | 214-343 of SEQ ID NO. 9 |
| (SEQ ID NO. 190) | NO. 37 | NO. 39 | NO. 45 | NO. 38 | NO. 46 | NO. 40 | |
| pCLS27714 | SEQ ID | SEQ ID | SEQ ID | SEQ ID | SEQ ID | SEQ ID | 147-269 of SEQ ID NO. 28 |
| (SEQ ID NO. 191) | NO. 37 | NO. 39 | NO. 45 | NO. 38 | NO. 46 | NO. 40 | |
| pCLS27715 | SEQ ID | SEQ ID | SEQ ID | SEQ ID | SEQ ID | SEQ ID | 151-303 of SEQ ID NO. 29 |
| (SEQ ID NO. 192) | NO. 37 | NO. 39 | NO. 45 | NO. 38 | NO. 46 | NO. 40 | |
| pCLS27716 | SEQ ID | SEQ ID | SEQ ID | SEQ ID | SEQ ID | SEQ ID | 329-417 of SEQ ID NO. 30 |
| (SEQ ID NO. 193) | NO. 37 | NO. 39 | NO. 45 | NO. 38 | NO. 46 | NO. 40 | |
| pCLS27717 | SEQ ID | SEQ ID | SEQ ID | SEQ ID | SEQ ID | SEQ ID | 442-697 of SEQ ID NO. 32 |
| (SEQ ID NO. 194) | NO. 37 | NO. 39 | NO. 45 | NO. 38 | NO. 46 | NO. 40 | |
| pCLS27718 | SEQ ID | SEQ ID | SEQ ID | SEQ ID | SEQ ID | SEQ ID | 453-698 of SEQ ID NO. 31 |
| (SEQ ID NO. 195) | NO. 37 | NO. 39 | NO. 45 | NO. 38 | NO. 46 | NO. 40 | |
| pCLS27719 | SEQ ID | SEQ ID | SEQ ID | SEQ ID | SEQ ID | SEQ ID | 463-595 of SEQ ID NO. 26 |
| (SEQ ID NO. 196) | NO. 37 | NO. 39 | NO. 45 | NO. 38 | NO. 46 | NO. 40 | |
| pCLS27720 | SEQ ID | SEQ ID | SEQ ID | SEQ ID | SEQ ID | SEQ ID | 331-551 of SEQ ID NO. 17 |
| (SEQ ID NO. 197) | NO. 37 | NO. 39 | NO. 45 | NO. 38 | NO. 46 | NO. 40 | |
| pCLS27721 | SEQ ID | SEQ ID | SEQ ID | SEQ ID | SEQ ID | SEQ ID | 334-453 of SEQ ID NO. 21 |
| (SEQ ID NO. 198) | NO. 37 | NO. 39 | NO. 45 | NO. 38 | NO. 46 | NO. 40 | |
| pCLS27722 | SEQ ID | SEQ ID | SEQ ID | SEQ ID | SEQ ID | SEQ ID | 337-467 of SEQ ID NO. 14 |
| (SEQ ID NO. 199) | NO. 37 | NO. 39 | NO. 45 | NO. 38 | NO. 46 | NO. 40 | |
| pCLS27723 | SEQ ID | SEQ ID | SEQ ID | SEQ ID | SEQ ID | SEQ ID | 345-499 of SEQ ID NO. 13 |
| (SEQ ID NO. 200) | NO. 37 | NO. 39 | NO. 45 | NO. 38 | NO. 46 | NO. 40 | |
| pCLS27724 | SEQ ID | SEQ ID | SEQ ID | SEQ ID | SEQ ID | SEQ ID | 237-463 of SEQ ID NO. 20 |
| (SEQ ID NO. 201) | NO. 37 | NO. 39 | NO. 45 | NO. 38 | NO. 46 | NO. 40 | |
| pCLS27725 | SEQ ID | SEQ ID | SEQ ID | SEQ ID | SEQ ID | SEQ ID | 206-348 of SEQ ID NO. 2 |
| (SEQ ID NO. 202) | NO. 37 | NO. 39 | NO. 45 | NO. 38 | NO. 46 | NO. 40 | |
| pCLS27726 | SEQ ID | SEQ ID | SEQ ID | SEQ ID | SEQ ID | SEQ ID | 206-348 of SEQ ID NO. 1 |
| (SEQ ID NO. 203) | NO. 37 | NO. 39 | NO. 45 | NO. 38 | NO. 46 | NO. 40 | |
| pCLS27727 | SEQ ID | SEQ ID | SEQ ID | SEQ ID | SEQ ID | SEQ ID | 206-341 of SEQ ID NO. 4 |
| (SEQ ID NO. 204) | NO. 37 | NO. 39 | NO. 45 | NO. 38 | NO. 46 | NO. 40 | |
| pCLS27728 | SEQ ID | SEQ ID | SEQ ID | SEQ ID | SEQ ID | SEQ ID | 203-377 of SEQ ID NO. 6 |
| (SEQ ID NO. 205) | NO. 37 | NO. 39 | NO. 45 | NO. 38 | NO. 46 | NO. 40 | |
| pCLS27729 | SEQ ID | SEQ ID | SEQ ID | SEQ ID | SEQ ID | SEQ ID | 201-375 of SEQ ID NO. 8 |
| (SEQ ID NO. 206) | NO. 37 | NO. 39 | NO. 45 | NO. 38 | NO. 46 | NO. 40 | |
| pCLS27730 | SEQ ID | SEQ ID | SEQ ID | SEQ ID | SEQ ID | SEQ ID | 301-444 of SEQ ID NO. 7 |
| (SEQ ID NO. 207) | NO. 37 | NO. 39 | NO. 45 | NO. 38 | NO. 46 | NO. 40 | |
| pCLS27731 | SEQ ID | SEQ ID | SEQ ID | SEQ ID | SEQ ID | SEQ ID | 301-455 of SEQ ID NO. 5 |
| (SEQ ID NO. 208) | NO. 37 | NO. 39 | NO. 45 | NO. 38 | NO. 46 | NO. 40 | |
| pCLS27732 | SEQ ID | SEQ ID | SEQ ID | SEQ ID | SEQ ID | SEQ ID | 296-410 of SEQ ID NO. 12 |
| (SEQ ID NO. 209) | NO. 37 | NO. 39 | NO. 45 | NO. 38 | NO. 46 | NO. 40 | |
| pCLS27733 | SEQ ID | SEQ ID | SEQ ID | SEQ ID | SEQ ID | SEQ ID | 592-738 of SEQ ID NO. 19 |
| (SEQ ID NO. 210) | NO. 37 | NO. 39 | NO. 45 | NO. 38 | NO. 46 | NO. 40 | |

[0152] According to one embodiment, the N-CAR of the invention comprises at least one of any one of the polypeptide sequences described in the column “Amino acids of the inhibitory polypeptide used” in table 1.

[0153] According to one embodiment, the inhibitory signaling transduction domain of the N-CAR of the invention consists in one of any one of the polypeptide sequences from a receptor involved in transduction signal described in the column “Amino acids of the inhibitory polypeptide used” in table 1.

[0154] According to one embodiment, the intracellular domain of the N-CAR comprises a polypeptide sequence from Tumor-necrosis-factor related apoptosis inducing ligand (TRAIL) receptor.

[0155] Endogenous TRAIL is expressed as a 281-amino acid type II trans-membrane protein, which is anchored to the plasma membrane and presented on the cell surface. TRAIL was independently identified (Wiley S R, Schooley K Smolak P J, Din W S, Huang C P, Nicholl J K, et al. “Identification and characterization of a new member of the TN F family that induces apoptosis. Immunity 1995; 3:673-82; and Pitti R M, Marsters S A, Ruppert S, Donahue O, Moore A, Ashkenazi A, 1996.” Induction of apoptosis by Apo-2 ligand, a new member of the tumor necrosis factor cytokine family”. J Biol Chem; 271:12687-90.) In the first publication, sequence alignments indicated its close relation to other death ligands, with highest sequence similarities reported for Fas ligand (FasL).

[0156] TRAIL is expressed by natural killer cells, which, following the establishment of cell-cell contacts, can induce TRAIL-dependent apoptosis in target cells (Smyth M J, Cretney E, Takeda K, Wiltrout R H, Sedger L M, Kayagaki N, et al., 2001, “Tumor necrosis factor-related apoptosis-inducing ligand (TRAIL) contributes to interferon gamma-dependent natural killer cell protection from tumor metastasis. J Exp Med; 193:661-70).

[0157] Physiologically, the TRAIL-signaling system was shown to be essential for immune surveillance, for shaping the immune system through regulating T-helper cell 1 versus T-helper cell 2 as well as “helpless” CD8⁺ T-cell numbers, and for the suppression of spontaneous tumor formation (Janssen E M, Droin N M, Lemmens E E, Pinkoski M J, Bensinger Si, Ehst B D, et al. 2005, “CD4+ T-cell help controls CD8+ T-cell memory via TRAIL-mediated activation-induced cell death”. Nature; 434:88-93.).

[0158] As reviewed in the publication (Hellwig C T, and Rehm M, 2012 “TRAIL Signaling and Synergy Mechanisms Used in TRAIL-Based Combination Therapies”, Mol Cancer Ther. 11(1):3-13), TRAIL and agonistic antibodies raised against TRAIL death receptors are highly promising new anticancer agents. In this review is described the recent advances in the molecular understanding of TRAIL signaling and the progress made in using TRAIL or agonistic antibodies clinically in mono- and combination therapies. Human agonistic monoclonal antibodies targeting TRAIL-R1 (mapatumumab) or TRAIL-R2 (lexatumumab) were used to treat everal metastatic, triple (estrogen receptor, progesterone receptor, and HER2)-negative cancer cell lines (Malin D, Chen F, Schiller C, Koblinski J, Cryns V L. 2011″Enhanced metastasis suppression by targeting TRAIL receptor 2 in a murine model of triple-negative breast cancer.” Clin Cancer Res. 17(15):5005-15).

[0159] These publications, a disclose an chimeric antigen receptor comprising an extracellular domain specific for a TRAIL receptor Tthe present invention relates to an iCAR (or N CAR) comprising an intracellular signaling domain derived from a TRAIL receptor, and in particular from a TRAIL receptor selected from TR10D (other names: TNFRSF10D:DCR2, TRAILR4, TRUNDD), TR10A (TNF receptor superfamily member 10, TRAIL-R1 or CD261), or TR10B (TNF receptor superfamily member 10B, TRAIL-R2 or CD262).

[0160] The present invention relates to an iCAR (or N CAR) comprising an intracellular signaling domain derived from a TRAIL receptor, said TRAIL receptor is involved in in caspase-8-mediated apoptosis through proteolytic activation and further NF-kappa-B activation.

[0161] In one embodiment, the present invention provides an iCAR (or N CAR) comprising an intracellular signaling domain comprising at least one sequence selected from SEQ ID NO: 33 (human TR10D), SEQ ID NO: 34 (human TR10A) and SEQ ID NO: 35 (human TR10B); According to one embodiment, the intracellular domain of the N-CAR consists in one of any one of the polypeptide sequences selected from SEQ ID NO: 33 (human TR10D), SEQ ID NO: 34 (human TR10A) and SEQ ID NO: 35 (human TR10B);

[0162] In another embodiment the present invention provides an iCAR (or N CAR) comprising an intracellular signaling domain comprising at least one sequence having more than 80%, preferably 90% and more preferably 95% identity with SEQ ID NO: 33 (human TR10D), SEQ ID NO: 34 (human TR10A) and SEQ ID NO: 35 (human TR10B).

[0163] As preferred ones, said polypeptide sequences of receptor have more than 80%, preferably 90% and more preferably 95% identity with SEQ ID NO: 33 (human TR10D), SEQ ID NO: 34 (human TR10A) and SEQ ID NO: 35 (human TR10B). Human TR10D is also called TNFRSF10D, DCR2, TRAILR4 or TRUNDD and has as ORF names UNQ251/PRO288. Human TR10A is also called TNFRSF10A, APO2, DR4 or TRAILR1. Human TR10B is also called TNFRSF10B, DR5 KILLER, TRAILR2, TRICK2 or ZTNFR9 and has as ORF names UNQ160/PRO186.

[0164] According to another embodiment, the intracellular domain of the N-CAR comprises a polypeptide sequence from the CD200 receptor 1, more preferably a sequence comprising a sequence of SEQ ID NO:36.

[0165] In another embodiment the present invention provides an iCAR (or N CAR) comprising an intracellular signaling domain comprising at least one sequence having more than 80%, preferably 90% and more preferably 95% identity with SEQ ID NO:36. The cell surface glycoprotein CD200 receptor 1 (Uniprot ref: Q8TD46) represents another example of intracellular domain part of the iCAR (or N CAR) of the present invention. This inhibitory receptor for the CD200/OX2 cell surface glycoprotein limits inflammation by inhibiting the expression of proinflammatory molecules including TNF-alpha, interferons, and inducible nitric oxide synthase (iNOS) in response to selected stimuli (Wright G J, Cherwinski H, Foster-Cuevas M, Brooke G, Puklavec M J, Bigler M, Song Y, Jenmalm M, Gorman D, McClanahan T, Liu M R, Brown M H, Sedgwick J D, Phillips J H, Barclay A N. 2003 “Characterization of the CD200 receptor family in mice and humans and their interactions with CD200. J Immunol. >>171(6):3034-46).

[0166] As preferred one, said polypeptide sequences of receptor have more than 80%, preferably 90% and more preferably 95% identity with SEQ ID NO: 36 (human cell surface glycoprotein CD200 receptor 1).

[0167] The above sequences are listed in the following table 2.

TABLE 2
Amino-acid sequences of intracellular domain from a Tumor-necrosis-factor related apoptosis
inducing ligand (TRAIL) receptor and cell surface glycoprotein CD200 receptor 1

| | UniProt | SEQ | |
|---|---|---|---|
| Name | entry | ID NO: | Amino-acid sequence |
| TR10D_HUMAN | Q9UBN6 | 33 | MGLWGQSVPTASSARAGRYPGARTASGTRPWLLDPKILKFVVFIVAVLLPVRVDSATIPRQDEVPQ |
| | | | QTVAPQQQRRSLKEEECPAGSHRSEYTGACNPCTEGVDYTIASNNLPSCLLCTVCKSGQTNKSSCT |
| | | | TTRDTVCQCEKGSFQDKNSPEMCRTCRTGCPRGMVKVSNCTPRSDIKCKNESAASSTGKTPAAEET |
| | | | VTTILGMLASPYHYLIIIVVLVIILAVVVVGFSCRKKFISYLKGICSGGGGGPERVHRVLFRRRSC |
| | | | PSRVPGAEDNARNETLSNRYLQPTQVSEQEIQGQELAELTGVTVESPEEPQRLLEQAEAEGCQRRR |
| | | | ASATLEEGHAKETIQDQLVGSEKLFYEEDEAGSATSCLLLVPVNDADSADISTLLD |
| TR10A_HUMAN | O00220 | 34 | MAPPPARVHLGAFLAVTPNPGSAASGTEAAAATPSKVWGSSAGRIEPRGGGRGALPTSMGQHGPSA |
| | | | RARAGRAPGPRPAREASPRLRVHKTFKFVVVGVLLQVVPSSAATIKLHDQSIGTQQWEHSPLGELC |
| | | | PPGSHRSEHPGACNRCTEGVGYTNASNNLFACLPCTACKSDEEERSPCTTTRNTACQCKPGTFRND |
| | | | NSAEMCRKCSRGCPRGMVKVKDCTPWSDIECVHKESGNGHNIWVILVVTLVVPLLLVAVLIVCCCI |
| | | | GSGCGGDPKCMDRVCFWRLGLLRGPGAEDNAHNEILSNADSLSTFVSEQQMESQEPADLTGVTVQS |
| | | | PGEAQCLLGPAEAEGSQRRRLLVPANGADPTETLMLFFDKFANIVPFDSWDQLMRQLDLTKNEIDV |
| | | | VRAGTAGPGDALYAMLMKWVNKTGRNASIHTLLDALERMEERHAREKIQDLLVDSGKFIYLEDGTG |
| | | | SAVSLE |
| TR10B_HUMAN | O14763 | 35 | MEQRGQNAPAASGARKRHGPGPREARGARPGPRVPKTLVLVVAAVLLLVSAESALITQQDLAPQQR |
| | | | AAPQQKRSSPSEGLCPPGHHISEDGRDCISCKYGQDYSTHWNDLLFCLRCTRCDSGEVELSPCTTT |
| | | | RNTVCQCEEGTFREEDSPEMCRKCRTGCPRGMVKVGDCTPWSDIECVHKESGTKHSGEVPAVEETV |
| | | | TSSPGTPASPCSLSGIIIGVTVAAVVLIVAVFVCKSLLWKKVLPYLKGICSGGGGDPERVDRSSQR |
| | | | PGAEDNVLNEIVSILQPTQVPEQEMEVQEPAEPTGVNMLSPGESEHLLEPAEAERSQRRRLLVPAN |
| | | | EGDPTETLRQCFDDFADLVPFDSWEPLMRKLGLMDNEIKVAKAEAAGHRDTLYTMLIKWVNKTGRD |
| | | | ASVHTLLDALETLGERLAKQKIEDHLLSSGKFMYLEGNADSAMS |
| Cell surface | Q8TD46 | 36 | MLCPWRTANLGLLLILTIFLVAASSSLCMDEKQITQNYSKVLAEVNTSWPVKMATNAVLCCPPIAL |
| glycoprotein | | | RNLIIITWEIILRGQPSCTKAYRKETNETKETNCTDERITWVSRPDQNSDLQIRPVAITHDGYYRC |
| CD200 receptor | | | IMVTPDGNFHRGYHLQVLVTPEVTLFQNRNRTAVCKAVAGKPAAQISWIPEGDCATKQEYWSNGTV |
| 1_human | | | TVKSTCHWEVHNVSIVTCHVSHLTGNKSLYIELLPVPGAKKSAKLYIPYIILTIIILTIVGFIWLL |
| | | | KVNGCRKYKLNKTESTPVVEEDEMQPYASYTEKNNPLYDTTNKVKASEALQSEVDTDLHTL |

[0168] Extracellular Binding Domain or the N CAR According to the Invention

[0169] The inhibitory chimeric antigen receptor (iCAR or N-CAR) and the positive chimeric antigen receptor (P-CAR) according to the present invention comprise an extracellular ligand-binding domain.

[0170] The term “extracellular ligand-binding domain” as used herein is defined as an oligo- or polypeptide that is capable of binding a ligand. Preferably, the domain will be capable of interacting with a cell surface molecule. For example, the extracellular ligand-binding domain may be chosen to recognize a ligand that acts as a cell surface marker on target cells associated with a particular disease state. The combination of at least the two input signals corresponding to the recognition of different ligands by each extracellular domains of said N-CAR and P-CAR allows the inhibition of the P-CAR via the inhibitory transduction domain contained in the N-CAR.

[0171] The system of the invention aims to avoid the “off target” events, wherein the engineered immune cells target not only tumoral cells due in particularly to lack of specificity of the antigen (the latter being present on the cancerous cells but can also be present on normal cells).

[0172] Therefore, the extracellular binding domains within the scope of the invention are chosen in such a way that the one belonging to the P-CAR recognizes on-target cells (i.e. tumoral cells) and the one belonging to the N-CAR recognizes off-target cells (healthy cells). Thus, when the engineered immune cell encounters a cancerous cell, only the P-CAR is able to bind to it and not the N-CAR, and consequently the P-CAR can be activated and the cancerous cell killed. In the other issue, when the engineered immune cell encounters a normal cell, both P-CAR and N-CAR can bind to it, and consequently the N-CAR can inactivate the P-CAR: the normal cell will be preserved.

[0173] The antigen binding domain of the N-CAR can be any domain that binds to the off-tissue antigen including but not limited to a monoclonal antibody, a recombinant antibody, a human antibody, a humanized antibody, and a functional fragment thereof.

[0174] A humanized antibody can be produced using a variety of techniques known in the art, including but not limited to, CDR-grafting (see, e.g., European Patent No. EP 239,400; International Publication No. WO 91/09967; and U.S. Pat. Nos. 5,225,539, 5,530,101, and 5,585,089, each of which is incorporated herein in its entirety by reference), veneering or resurfacing (see, e.g., European Patent Nos. EP 592,106 and EP 519,596; Padlan, 1991, Molecular Immunology, 28(4/5):489-498; Studnicka et al., 1994, Protein Engineering, 7(6):805-814; and Roguska et al., 1994, PNAS, 91:969-973, each of which is incorporated herein by its entirety by reference), chain shuffling (see, e.g., U.S. Pat. No. 5,565,332, which is incorporated herein in its entirety by reference), and techniques disclosed in, e.g., U.S. Patent Application Publication No. US2005/0042664, U.S. Patent Application Publication No. US2005/0048617, U.S. Pat. No. 6,407,213, U.S. Pat. No. 5,766,886, International Publication No. WO 9317105, Tan et al., J. Immunol., 169: 1119-25 (2002), Caldas et al., Protein Eng., 13(5):353-60 (2000), Morea et al., Methods, 20(3):267-79 (2000), Baca et al., J. Biol. Chem., 272(16): 10678-84 (1997), Roguska et al., Protein Eng., 9(10):895-904 (1996), Couto et al., Cancer Res., 55 (23 Supp):5973s-5977s (1995), Couto et al., Cancer Res., 55(8): 1717-22 (1995), Sandhu J S, Gene, 150(2):409-10 (1994), and Pedersen et al., J. Mol. Biol., 235(3):959-73 (1994), each of which is incorporated herein in its entirety by reference. Often, framework residues in the framework regions will be substituted with the corresponding residue from the CDR donor antibody to alter, for example improve, antigen binding. These framework substitutions are identified by methods well-known in the art, e.g., by modeling of the interactions of the CDR and framework residues to identify framework residues important for antigen binding and sequence comparison to identify unusual framework residues at particular positions. (See, e.g., Queen et al., U.S. Pat. No. 5,585,089; and Riechmann et al., 1988, Nature, 332:323, which are incorporated herein by reference in their entireties.).

[0175] In a preferred embodiment, said extracellular ligand-binding domain is a single chain antibody fragment (scFv). The latter comprises usually the light (V_{L}) and the heavy (V_{H}) variable fragment of a target antigen specific monoclonal antibody joined by a flexible linker. Other binding domain than scFv can also be used for predefined targeting of lymphocytes, such as camelid single-domain antibody fragments, receptor ligands like a vascular endothelial growth factor polypeptide, an integrin-binding peptide, heregulin or an IL-13 mutein, antibody binding domains, antibody hypervariable loops or CDRs as non-limiting examples.

[0176] In some embodiments, the antibody binding domain is a Fv, a Fab, a (Fab′)2, or a bi-functional (e.g. bi-specific) hybrid antibody (e.g., Lanzavecchia et al., Eur. J. Immunol. 17, 105 (1987)). In some embodiments, the antigen binding domain of the N-CAR of the invention binds an off-tissue antigen with wild-type or enhanced affinity.

[0177] By “affinity” is meant a measure of binding strength. Without being bound to theory, affinity depends on the closeness of stereochemical fit between antibody combining sites and antigen determinants, on the size of the area of contact between them, and on the distribution of charged and hydrophobic groups. Affinity also includes the term “avidity,” which refers to the strength of the antigen-antibody bond after formation of reversible complexes. Methods for calculating the affinity of an antibody for an antigen are known in the art, including use of binding experiments to calculate affinity. Antibody activity in functional assays (e.g., flow cytometry assay) is also reflective of antibody affinity. Antibodies and affinities can be phenotypically characterized and compared using functional assays (e.g, flow cytometry assay).

[0178] In some instances, scFvs can be prepared according to method known in the art (see, for example, Bird et al., (1988) Science 242:423-426 and Huston et al., (1988) Proc. Natl. Acad. Sci. USA 85:5879-5883). ScFv molecules can be produced by linking VH and VL regions together using flexible polypeptide linkers. The scFv molecules comprise a linker (e.g., a SerGly linker) with an optimized length and/or amino acid composition. The linker length can greatly affect how the variable regions of a scFv fold and interact. In fact, if a short polypeptide linker is employed (e.g., between 5-10 amino acids) intrachain folding is prevented. Interchain folding is also required to bring the two variable regions together to form a functional epitope binding site. For examples of linker orientation and size see, e.g., Hollinger et al. 1993 Proc Natl Acad. Sci. U.S.A. 90:6444-6448, U.S. Patent Application Publication Nos. 2005/0100543, 2005/0175606, 2007/0014794, and PCT publication Nos. WO2006/020258 and WO2007/024715, is incorporated herein by reference.

[0179] An scFv can comprise a linker of at least 1, 2, 3, 4, 5, 6, 7, 8, 9, 10, 11, 12, 13, 14, 15, 16, 17, 18, 19, 20, 25, 30, 35, 40, 45, 50, or more amino acid residues between its VL and VH regions. The linker sequence may comprise any naturally occurring amino acid. The linker sequence may comprise amino acids glycine and serine. The linker sequence may comprise sets of glycine and serine repeats such as (Gly4Ser)n, where n is a positive integer equal to or greater than 1. The linker can be (Gly4Ser)4 or (Gly4Ser)3. Variation in the linker length may retain or enhance activity, giving rise to superior efficacy in activity studies.

[0180] In a preferred embodiment, the antigen binding domain of the N-CAR comprises an scFv. The off-tissue antigen recognized by the antigen binding domain of the N-CAR is preferably an antigen that is not present or present at low level on the tumour cells targeted by the P-CAR.

[0181] In a preferred embodiment, the antigen binding domain of the N-CAR comprises a scFv. The off-tissue antigen recognized by the antigen binding domain of the N-CAR is preferably an antigen that is not present or present at low level on the tumour cells targeted by the P-CAR and is expressed in normal tissue (non precancerous or non cancerous).

[0182] By “cancerous or tumor cell”, it is meant cells differing from normal cells in many ways that allow them to grow out of control and become invasive. Cancer cells are less specialized than normal cells and continue to divide without stopping. They are able to ignore signals that normally tell cells to stop dividing or that begin a process known as programmed cell death, or apoptosis, which the body uses to get rid of unneeded cells.

[0183] Present at low level on the tumour cells targeted by the P-CAR means that the expression of said off-tissue antigen is undetectable in tumor cells using any known technique of antigen detection (eg flow cytometry, himmunohisto chemistry, western blot) or represents less than 10% expression as compared to expression in a cell or a tissue used as a positive control.

[0184] In one embodiment said the antigen binding domain of the N-CAR comprises at least a scFv specific for any one of the following antigen CD56, CD205, CD83, CD206, CD200, CD36, RARRES1, Troponin C, Beta-1 integrin, CCKBR, GALR1, CD4, CD20, CD22, CD25, MUC1 antigen CD20.

[0185] In one embodiment said the antigen binding domain of the N-CAR comprises at least a scFv specific for any one of the following antigen CD56, CD205, CD83, CD206, CD200, CD36, or RARRES1.

[0186] In one embodiment said the antigen binding domain of the N-CAR comprises at least a scFv specific for any one of the following antigen Troponin C, Beta-1 integrin, CCKBR, or GALR1.

[0187] In one embodiment said the antigen binding domain of the N-CAR comprises a scFv specific for any one of the following antigen CD4, CD20, CD22, CD25, MUC1 antigen. In one embodiment said the antigen binding domain of the N-CAR comprises at least a scFv specific for any one of the following antigen CD20, PSMA, BCMA, CD19The below table 3 provides examples of combinations of N-CAR and P-CAR antigens. Combinations of a P-CAR directed to anti-D33, FLT3, MUC16, and to anti-MUC17 CAR with their N-CARs counterparts, are not part of the present invention.

| P-CAR Antigen | N-CAR Antigen |
|---|---|
| CD38 | CD56 antigen: expression on the surface of neurons, glia, skeletal muscle |
| | and natural killer cells |
| | CD205 antigen: expression on cortical thymic epithelial cells and by |
| | dendritic cell (DC) subsets |
| | CD83 antigen: expression on activated lymphocytes, Langerhans cells and |
| | interdigitating reticulum cells |
| | CD206 antigen: expression on the surface of macrophages and dendritic |
| | cells, on the surface of skin cells such as human dermal fibroblasts and |
| | keratinocytes |
| | CD200 antigen: expression on cells originating from the hematopoietic |
| | cells, activated T cells, endothelial neuronal cells and cells of the |
| | reproductive organs (ovaries and placental trophoblasts) |
| | CD36 antigen: expression in adipocytes endothelial cells and monocytes |
| | RARRES1 antigen: expression of this gene upregulated by tazarotene as |
| | well as by retinoic acid receptors |
| CS1 | Troponin C antigen: expression in heart |
| | Beta-1 integrin antigen: expression in endothelial cells and fibroblasts (at |
| | protein level). Expression in intestine, colon, testis, ovary, thymus, spleen |
| | and prostate |
| | CCKBR antigen: expression in stomach, pancreas, brain and gallbladder |
| | GALR1 antigen: expression in adrenal gland |
| | CUBN antigen: expression in kidney and small intestine |
| CD123 | CD4 antigen: expression in appendix, bone marrow, lymph node, tonsil and |
| | spleen |
| | CD20 antigen: expression mainly in spleen appendix and lymph node |
| | CD22 antigen: expression in particular in appendix, lymph node, tonsil and |
| | spleen |
| | CD25 antigen: expression mainly in bladder and lymph node |
| | MUC1 antigen: expression in kidney |
| ROR1 | Troponin C antigen: expression in heart |
| | Beta-1 integrin antigen: expression in endothelial cells and fibroblasts (at |
| | protein level). Expression in intestine, colon, testis, ovary, thymus, spleen |
| | and prostate |
| | CCKBR antigen: expression in stomach, pancreas, brain and gallbladder |
| | GALR1 antigen: expression in adrenal gland |
| | MUC1 antigen: expression in kidney |
| CD33 | Antigens specifically expressed in dendritic cells and/or haematopoetic stem |
| | cells such as ITGAX, CD1E, CD34, CD1C, CD123, CD141 |
| FLT3 | Antigens specifically expressed in haematopoetic stem cells such as CD34 or |
| | specifically expressed in Brain cerebellum such as ZP2, GABRA6, CRTAM, |
| | GRM4, MDGA1 |
| MSLN | Antigens specifically expressed in lung such as SFTPC, ROS1, SLC6A4, AGTR2 |
| MUC16 | Antigens specifically expressed in salivary gland such as LRRC26, HTR3A, |
| | TMEM211, MRGPRX3 |
| MUC17 | Antigens specifically expressed in colon & small intestine such as MEP1B, |
| | TMIGD1, CEACAM20, ALPI |
| CD20 | CD20 |

[0188] Extracellular-Binding Domain of N-CAR According to the Invention

[0189] In the various embodiments of the aspects delineated herein, the binding of an antigen to the NCAR activates the intracellular signaling domain resulting in a decrease in an immune response, preferably in the CTL activity.

[0190] In the present invention, the antigen binding domain of the N-CAR binds to a cell-surface protein present in normal tissue but not present or present at lower level on a tumor as compared to a the same cell in normal tissue said binding domain binds to an off-tissue antigen.

[0191] N-CAR antigens could also include antigens that are independent of the antigen that the P-CAR is targeting and that are down-regulated in tumor of interest, but present in all normal tissues of concern. Examples of such antigens for pancreatic ductal adenocarcinoma are TMPRSS11B, CYP17A1 and ATP4B and examples of such antigens for kidney clear cell carcinoma are GP2, MUC21, CLCA4 and SLC27A6.

[0192] In certain embodiments, the subject has metastatic breast cancer, hematological malignancy, or a solid tumor, and the human leukocyte antigen (HLA) is HLA-I. In certain embodiments, the subject has a tumor that has undergone epithelium to mesenchymal transition (EMT), and the antigen is one or more of an Epithelial-mesenchymal transition (EMT) antigen, E-cadherin, and cytokeratin. In various embodiments, the binding of the inhibitory chimeric antigen receptor and the antigen, decreases cell death in a cell comprising the antigen. The method can reduce graft versus host disease (GVHD) in the subject, or a symptom thereof.

[0193] Extracellular-Binding Domain of P-CAR

[0194] The extracellular ligand-binding domain of a P CAR according to the present invention can also comprise a peptide binding an antigen of the target, a peptide or a protein binding an antibody that binds an antigen of the target, a peptide or a protein ligand such as a growth factor, a cytokine or a hormone as non-limiting examples binding a receptor on the target, or a domain derived from a receptor such as a growth factor receptor, a cytokine receptor or a hormone receptor as non-limiting examples, binding a peptide or a protein ligand on the target. Preferably the target is a cell.

[0195] As non-limiting example, the ligand of the target can be a tumor-associated surface antigen, such as ErbB2 (HER2/neu), carcinoembryonic antigen (CEA), epithelial cell adhesion molecule (EpCAM), epidermal growth factor receptor (EGFR), CD19, CD20, CD30, CD40, disialoganglioside GD2, GD3, C-type lectin-like molecule-1 (CLL-1), ductal-epithelial mucine, gp36, TAG-72, glycosphingolipids, glioma-associated antigen, β-human chorionic gonadotropin, alphafetoprotein (AFP), lectin-reactive AFP, thyroglobulin, RAGE-1, MN-CA IX, human telomerase reverse transcriptase, RU1, RU2 (AS), intestinal carboxyl esterase, mut hsp70-2, M-CSF, prostase, prostase specific antigen (PSA), PAP, NY-ESO-1, LAGA-la, p53, prostein, PSMA, surviving and telomerase, prostate-carcinoma tumor antigen-1 (PCTA-1), MAGE, ELF2M, neutrophil elastase, ephrin B2, CD22, insulin growth factor (IGF1)-I, IGF-II, IGFI receptor, mesothelin, a major histocompatibility complex (MHC) molecule presenting a tumor-specific peptide epitope, 5T4, ROR1, Nkp30, NKG2D, tumor stromal antigens, the extra domain A (EDA) and extra domain B (EDB) of fibronectin and the A1 domain of tenascin-C (TnC A1) and fibroblast associated protein (fap), LRP6, melamona-associated Chondroitin Sulfate Proteoglycan (MCSP), CD38/CS1, MART1, WT1, MUC1, LMP2, Idiotype, NY-ESO-1, Ras mutant, gp100, proteinase 3, bcr-abl, tyrosinase, hTERT, EphA2, ML-TAP, ERG, NA17, PAX3, ALK, Androgen receptor; a lineage-specific or tissue specific antigen such as CD3, CD4, CD8, CD24, CD25, CD34, CD79, CD116, CD117, CD135, CD123, CD133, CD138, CTLA-4, B7-1 (CD80), B7-2 (CD86), endoglin, a major histocompatibility complex (MHC) molecule, BCMA (CD269, TNFRSF 17), or a virus-specific surface antigen such as an HIV-specific antigen (such as HIV gp120); an EBV-specific antigen, a CMV-specific antigen, a HPV-specific antigen, a Lasse Virus-specific antigen, an Influenza Virus-specific antigen as well as any derivate or variant of these surface markers. In specific cases, the ligand that the chimeric antigen receptor recognizes is present on the surface of a target cell, particularly cancer cell or viral cell. In some embodiments, the ligand that the chimeric antigen receptor recognizes is present in a tumor microenvironment. In some aspects of the invention, the ligand that the chimeric antigen receptor recognizes is a growth factor.

[0196] In a preferred embodiment, CD33, BCMA and EGFRVIII do not belong to the present invention.

[0197] N-CAR Architecture & its Other Components

[0198] The N-CAR of the invention may have the single-chain or the multi-chain architecture. The multi-chain conformation is disclosed in WO2014039523.

[0199] The N-CAR of the present invention is a transmembrane polypeptide containing at least:
[0200] an extracellular binding domain;
[0201] a transmembrane domain and,
[0202] an intracellular domain comprising at least one polypeptide sequence involved in transduction signal, preferably an inhibitory transduction signal said polypeptide sequence is not significantly expressed in T-cell, and/or said polypeptide sequence is from a (TRAIL) receptor and/or from a CD200 receptor 1, provided that said polypeptide sequence is not a sequence selected from group consisting of SEQ ID NO:13 (human SIGL8), SEQ ID NO:14 (human SIGL7), SEQ ID NO:17 (human SIGL5), SEQ ID NO:20 (human SIGL9), SEQ ID NO: 21 (human SIGL6), SEQ ID NO:22 (human CD33), SEQ ID NO:26 (human SIG12), SEQ ID NO:31 (human SIG11), SEQ ID NO:32 (human SIG10) and SEQ ID NO:19 (human PECA1).

[0203] In a preferred embodiment, said intracellular domain comprises a polypeptide sequence also called inhibitory transduction domain. By “inhibitory transduction domain”, it is meant here a transmembrane polypeptide which contains a region encoding for an inhibitory transduction signal.

[0204] In a preferred embodiment said inhibitory transduction signal attenuates the activity of the immune cells, in particular of the CTL activity, preferably a CTL activity induced upon binding of a P-CAR of the invention.

[0205] According to a preferred embodiment, the N-CAR comprises at least:
[0206] an extracellular binding domain;
[0207] a transmembrane domain and,
[0208] an intracellular domain comprising at least one polypeptide sequence involved in transduction signal, preferably an inhibitory transduction signal said polypeptide sequence is not significantly expressed in T-cell, and/or said polypeptide sequence is from a (TRAIL) receptor and/or from a CD200 receptor 1, provided that said polypeptide sequence is not a sequence selected from group consisting of SEQ ID NO:13 (human SIGL8), SEQ ID NO:14 (human SIGL7), SEQ ID NO:17 (human SIGL5), SEQ ID NO:20 (human SIGL9), SEQ ID NO: 21 (human SIGL6), SEQ ID NO:22 (human CD33), SEQ ID NO:26 (human SIG12), SEQ ID NO:31 (human SIG11), SEQ ID NO:32 (human SIG10) and SEQ ID NO:19 (human PECA1)
[0209] wherein said inhibitory transmembrane polypeptide comprises a sequence with more than 80%, preferably 90% and more preferably 95% identity with SEQ ID NO: 1 (human KI2L2), SEQ ID NO: 2 (human KI2L1), SEQ ID NO:3 (human FCG2B), SEQ ID NO:4 (human KI2L3), SEQ ID NO: 5 (human KI3L2), SEQ ID NO:6 (human KI2L4), SEQ ID NO:7 (human KI3L1), SEQ ID NO:8 (human KI2LA), SEQ ID NO:9 (human MILR1), SEQ ID NO:10 (human LIRB4), SEQ ID NO:11 (human LIRB3), SEQ ID NO:12 (human KI3L3), SEQ ID NO:15 (human LIRB5), SEQ ID NO:16 (human LIRB2), SEQ ID NO:18 (human FCRL4), SEQ ID NO:23 (human FCRL5), SEQ ID NO:24 (human FCRL2), SEQ ID NO: 25 (human FCRL1), SEQ ID NO:27 (human FCRL3), SEQ ID NO:28 (human MPZL1), SEQ ID NO:29 (human PILRA) or SEQ ID NO:30 (human PVR).

[0210] According to a more preferred embodiment, the N-CAR comprises at least:
[0211] an extracellular binding domain;
[0212] a transmembrane domain and,

[0213] an intracellular domain comprising
[0214] an inhibitory transmembrane polypeptide comprising a sequence selected from the list consisting of SEQ ID NO: 1 (human KI2L2), SEQ ID NO: 2 (human KI2L1), SEQ ID NO:3 (human FCG2B), SEQ ID NO:4 (human KI2L3), SEQ ID NO: 5 (human KI3L2), SEQ ID NO:6 (human KI2L4), SEQ ID NO:7 (human KI3L1), SEQ ID NO:8 (human KI2LA), SEQ ID NO:9 (human MILR1), SEQ ID NO:10 (human LIRB4), SEQ ID NO:11 (human LIRB3), SEQ ID NO:12 (human KI3L3), SEQ ID NO:15 (human LIRB5), SEQ ID NO:16 (human LIRB2), SEQ ID NO:18 (human FCRL4), SEQ ID NO:23 (human FCRL5), SEQ ID NO:24 (human FCRL2), SEQ ID NO: 25 (human FCRL1), SEQ ID NO:27 (human FCRL3), SEQ ID NO:28 (human MPZL1), SEQ ID NO:29 (human PILRA) or SEQ ID NO:30 (human PVR).

[0215] According to an embodiment, the N-CAR comprises at least: an extracellular binding domain;
[0216] a transmembrane domain and,
[0217] an intracellular domain comprising
[0218] an inhibitory transmembrane polypeptide comprising a sequence with more than 80%, preferably 90% and more preferably 95% identity with SEQ ID NO:36 (CD200 receptor 1).

[0219] According to a more preferred embodiment, the N-CAR comprises at least:
[0220] an extracellular binding domain;
[0221] a transmembrane domain and,
[0222] an intracellular domain comprising
[0223] a sequence of SEQ ID NO:36 (CD200 receptor 1).

[0224] According to a preferred embodiment, the N-CAR comprises at least:
[0225] an extracellular binding domain;
[0226] a transmembrane domain and,
[0227] an intracellular domain comprising a sequence with more than 80%, preferably 90% and more preferably 95% identity with SEQ ID NO: 33 (human TR10D), SEQ ID NO: 34 (human TR10A) or SEQ ID NO: 35 (human TR10B).

[0228] According to an even more preferred embodiment, the N-CAR comprises at least:
[0229] an extracellular binding domain;
[0230] a transmembrane domain and,
[0231] an intracellular domain comprising a sequence selected from the list consisting of

[0232] SEQ ID NO: 33 (human TR10D), SEQ ID NO: 34 (human TR10A) and SEQ ID NO: 35 (human TR10B).

[0233] According to one more preferred embodiment, the N-CAR comprises at least:
[0234] an extracellular binding domain;
[0235] a transmembrane domain and,
[0236] an intracellular domain comprising a sequence with more than 80%, preferably 90% and more preferably 95% identity with SEQ ID NO: 33 (human TR10D).

[0237] According to one more preferred embodiment, the N-CAR comprises at least:
[0238] an extracellular binding domain;
[0239] a transmembrane domain and,
[0240] an intracellular domain comprising a sequence of SEQ ID NO: 33 (human TR10D).

[0241] According to one more preferred embodiment, the N-CAR comprises at least:
[0242] an extracellular binding domain;
[0243] a transmembrane domain and,
[0244] an intracellular domain comprising a sequence with more than 80%, preferably 90% and more preferably 95% identity with SEQ ID NO: 34 (human TR10A).

[0245] According to one more preferred embodiment, the N-CAR comprises at least:
[0246] an extracellular binding domain;
[0247] a transmembrane domain and,
[0248] an intracellular domain comprising a sequence of SEQ ID NO: 34 (human TR10A).

[0249] According to one more preferred embodiment, the N-CAR comprises at least:
[0250] an extracellular binding domain;
[0251] a transmembrane domain and,
[0252] an intracellular domain comprising a sequence with more than 80%, preferably 90% and more preferably 95% identity with SEQ ID NO: 35 (human TR10B).

[0253] According to one more preferred embodiment, the N-CAR comprises at least:
[0254] an extracellular binding domain;
[0255] a transmembrane domain and,
[0256] an intracellular domain comprising a sequence of SEQ ID NO: 35 (human TR10B).

[0257] According to one preferred embodiment, the N-CAR of the present comprising:
[0258] an extracellular domain comprising an antigen binding domain;
[0259] a transmembrane domain;
[0260] an intracellular domain;

[0261] wherein said intracellular domain comprises a polypeptide sequence consisting essentially of aminoacids No 201-375 from SEQ ID NO:8 (human KI2LA).

[0262] By “polypeptide sequence consisting essentially of”, it is meant that the polypeptide is the one identical to the part of the inhibitory molecule which is used in the N-CARs presented here. However, at least one to a few amino acid substitution(s) is(are) contemplated within the present invention in order to bring a modulation of its inhibitory function in case of need.

[0263] According to one preferred embodiment, the N-CAR of the present comprising:
[0264] an extracellular domain comprising an antigen binding domain;
[0265] a transmembrane domain;
[0266] an intracellular domain;
[0267] wherein said intracellular domain comprises a polypeptide sequence consisting essentially of amino acids No 206-348 from SEQ ID NO:2 (human KIR2DL1).

[0268] According to one preferred embodiment, the N-CAR of the present comprising:
[0269] an extracellular domain comprising an antigen binding domain;
[0270] a transmembrane domain;
[0271] an intracellular domain;
[0272] wherein said intracellular domain comprises a polypeptide sequence consisting essentially of amino acids No 206-348 from SEQ ID NO:1 (human KIR2DL2).

[0273] According to one preferred embodiment, the N-CAR of the present comprising:
[0274] an extracellular domain comprising an antigen binding domain;
[0275] a transmembrane domain;
[0276] an intracellular domain;
[0277] wherein said intracellular domain comprises a polypeptide sequence consisting essentially of amino acids No 206-341 from SEQ ID NO:4 (human KIR2DL3).

[0278] According to one preferred embodiment, the N-CAR of the present comprising:
[0279] an extracellular domain comprising an antigen binding domain;
[0280] a transmembrane domain;
[0281] an intracellular domain;
[0282] wherein said intracellular domain comprises a polypeptide sequence consisting essentially of amino acids No 206-348 from SEQ ID NO:2 (human KIR2DL1).

[0283] According to one preferred embodiment, the N-CAR of the present comprising:
[0284] an extracellular domain comprising an antigen binding domain;
[0285] a transmembrane domain;
[0286] an intracellular domain;
[0287] wherein said intracellular domain comprises a polypeptide sequence consisting essentially of amino acids No 203-377 from SEQ ID NO:6 (human KIR2DL4).

[0288] According to one preferred embodiment, the N-CAR from the present comprising:
[0289] an extracellular domain comprising an antigen binding domain;
[0290] a transmembrane domain;
[0291] an intracellular domain;

[0292] wherein said intracellular domain comprises a polypeptide sequence consisting essentially of amino acids No 301-444 from SEQ ID NO:7 (human KIR3DL1).

[0293] According to one preferred embodiment, the N-CAR of the present comprising:
[0294] an extracellular domain comprising an antigen binding domain;
[0295] a transmembrane domain;
[0296] an intracellular domain;

[0297] wherein said intracellular domain comprises a polypeptide sequence consisting essentially of amino acids No 301-455 from SEQ ID NO:5 (human KIR3DL2).

[0298] According to one preferred embodiment, the N-CAR of the present comprising:
[0299] an extracellular domain comprising an antigen binding domain;
[0300] a transmembrane domain;
[0301] an intracellular domain;

[0302] wherein said intracellular domain comprises a polypeptide sequence consisting essentially of amino acids No 204-310 from SEQ ID NO:24 (human FRGR2B).

[0303] According to one preferred embodiment, the N-CAR of the present comprising:
[0304] an extracellular domain comprising an antigen binding domain;
[0305] a transmembrane domain;
[0306] an intracellular domain;
[0307] wherein said intracellular domain comprises a polypeptide sequence consisting essentially of amino acids No 214-343 from SEQ ID NO:9 (human MILR1).

[0308] According to one preferred embodiment, the N-CAR of the present comprising:
[0309] an extracellular domain comprising an antigen binding domain;
[0310] a transmembrane domain;
[0311] an intracellular domain;
[0312] wherein said polypeptide sequence of the receptor of amino acids No 216-448 from SEQ ID NO:10 (human LIRB4).

[0313] According to one preferred embodiment, the N-CAR of the present comprising:
[0314] an extracellular domain comprising an antigen binding domain;
[0315] a transmembrane domain;
[0316] an intracellular domain;
[0317] wherein said intracellular domain comprises a polypeptide sequence consisting essentially of amino acids No 420-631 from SEQ ID NO:11 (human LIRB3).

[0318] According to one preferred embodiment, the N-CAR of the present comprising:
[0319] an extracellular domain comprising an antigen binding domain;
[0320] a transmembrane domain;
[0321] an intracellular domain;

[0322] wherein said intracellular domain comprises a polypeptide sequence consisting essentially of amino acids No 296-410 from SEQ ID NO:12 (human KI3L3).

[0323] According to one preferred embodiment, the N-CAR of the present comprising:
[0324] an extracellular domain comprising an antigen binding domain;
[0325] a transmembrane domain;
[0326] an intracellular domain;

[0327] wherein said intracellular domain comprises a polypeptide sequence consisting essentially of amino acids No 419-590 from SEQ ID NO:15 (human LIRB5).

[0328] According to one preferred embodiment, the N-CAR of the present comprising:
[0329] an extracellular domain comprising an antigen binding domain;
[0330] a transmembrane domain;
[0331] an intracellular domain;

[0332] wherein said intracellular domain comprises a polypeptide sequence consisting essentially of amino acids No 420-598 from SEQ ID NO:16 (human LIRB2).

[0333] According to one preferred embodiment, the N-CAR of the present comprising:
[0334] an extracellular domain comprising an antigen binding domain;
[0335] a transmembrane domain;
[0336] an intracellular domain;

[0337] wherein said intracellular domain comprises a polypeptide sequence consisting essentially of amino acids No 375-515 from SEQ ID NO:18 (human FCRL4).

[0338] According to one preferred embodiment, the N-CAR of the present comprising:
[0339] an extracellular domain comprising an antigen binding domain;
[0340] a transmembrane domain;
[0341] an intracellular domain;

[0342] wherein said intracellular domain comprises a polypeptide sequence consisting essentially of amino acids No 753-977 from SEQ ID NO:23 (human FCRL5).

[0343] According to one preferred embodiment, the N-CAR of the present comprising:
[0344] an extracellular domain comprising an antigen binding domain;
[0345] a transmembrane domain;
[0346] an intracellular domain;

[0347] wherein said intracellular domain comprises a polypeptide sequence consisting essentially of amino acids No 388-508 from SEQ ID NO:24 (human FCRL2).

[0348] According to one preferred embodiment, the N-CAR of the present comprising:
[0349] an extracellular domain comprising an antigen binding domain;
[0350] a transmembrane domain;
[0351] an intracellular domain;

[0352] wherein said intracellular domain comprises a polypeptide sequence consisting essentially of amino acids No 292-429 from SEQ ID NO: 25 (human FCRL1).

[0353] According to one preferred embodiment, the N-CAR of the present comprising:
[0354] an extracellular domain comprising an antigen binding domain;
[0355] a transmembrane domain;
[0356] an intracellular domain;

[0357] wherein said intracellular domain comprises a polypeptide sequence consisting essentially of amino acids No 564-734 from SEQ ID NO:27 (human FCRL3).

[0358] According to one preferred embodiment, the N-CAR of the present comprising:
[0359] an extracellular domain comprising an antigen binding domain;
[0360] a transmembrane domain;
[0361] an intracellular domain;

[0362] wherein said intracellular domain comprises a polypeptide sequence consisting essentially of amino acids No 147-269 from SEQ ID NO:28 (human MPZL1).

[0363] According to one preferred embodiment, the N-CAR of the present comprising:
[0364] an extracellular domain comprising an antigen binding domain;
[0365] a transmembrane domain;
[0366] an intracellular domain;
[0367] wherein said intracellular domain comprises a polypeptide sequence consisting essentially of amino acids No 151-303 from SEQ ID NO:29 (human PILRA).

[0368] According to one preferred embodiment, the N-CAR of the present comprising:
[0369] an extracellular domain comprising an antigen binding domain;
[0370] a transmembrane domain;
[0371] an intracellular domain;

[0372] wherein said intracellular domain comprises a polypeptide sequence consisting essentially of amino acids No 329-417 from SEQ ID NO:30 (human PVR).

[0373] According to one preferred embodiment, the N-CAR of the present comprising:
[0374] an extracellular domain comprising an antigen binding domain;
[0375] a transmembrane domain;
[0376] an intracellular domain;

[0377] wherein said intracellular domain comprises a polypeptide sequence consisting essentially of amino acids No 229-325 from SEQ ID NO:36 (human CD200 receptor1).

[0378] According to a preferred embodiment, the N-CAR of the present comprising:
[0379] an extracellular domain comprising an antigen binding domain;
[0380] a transmembrane domain;
[0381] an intracellular domain;

[0382] wherein said intracellular domain comprises a polypeptide sequence consisting essentially of amino acids No 181-386 from SEQ ID NO:33 (human TR10D).

[0383] According to a preferred embodiment, the N-CAR of the present comprising:
[0384] an extracellular domain comprising an antigen binding domain;
[0385] a transmembrane domain;
[0386] an intracellular domain;

[0387] wherein said intracellular domain comprises a polypeptide sequence consisting essentially of amino acids No 230-468 from SEQ ID NO:34 (human TR10A)

[0388] According to a preferred embodiment, the N-CAR of the present comprising:
[0389] an extracellular domain comprising an antigen binding domain;
[0390] a transmembrane domain;
[0391] an intracellular domain;

[0392] wherein said intracellular domain comprises a polypeptide sequence consisting essentially of amino acids No 179-440 from SEQ ID NO:35 (human TR10B).

[0393] According to another preferred embodiment, the N-CAR comprises at least:
[0394] an extracellular binding domain;
[0395] an transmembrane domain, and;
[0396] a linker between the extracellular binding domain and the transmembrane domain,

[0397] said linker can be any one known by the skilled man in the art.

[0398] Preferably, this linker is a GS linker 1 or a GS linker 2 comprising a sequences of SEQ ID NO:39 and SEQ ID NO:40, more preferably this linker is a GS linker 1 or a GS linker 2 consisting in a sequences of SEQ ID NO:39 and SEQ ID NO:40.

[0399] Therefore, the extracellular part of the N-CAR may comprises:
[0400] an extracellular-binding domain comprising at least one scFvs from a monoclonal antibody for binding to “off-target” antigen expressed on healthy cells; and preferably said off-target” antigen is not expressed on cells targeted by the P-CAR.a transmembrane domain and;
[0401] a linker binding together the two previous components.

[0402] Said above scFvs of a monoclonal antibody binds preferably to “off-target” antigens expressed in healthy tissues or healthy cells.

[0403] For instance, for the treatment of acute myeloid leukemia (AML), when the antigen targeted by the P-CAR is CD123, said extracellular-binding domain of the N-CAR binds to at least one “off-target” antigen expressed on healthy cells or healthy immune cells that may be chosen amongst an antigen selected from CD4 antigen (expressed in appendix, bone marrow, lymph node, tonsil and spleen), CD20 antigen (expressed mainly in spleen appendix and lymph node), CD22 antigen (expressed in particular in appendix, lymph node, tonsil and spleen), CD25 antigen (expressed mainly in bladder and lymph node) and MUC1 antigen (expressed in kidney).

[0404] Therefore, in one embodiment, the N-CAR of the invention comprises at least:
[0405] an extracellular domain comprising at least one scFv from and an antibody binding specifically to an antigen selected from CD4 antigen, CD20 antigen, CD22 antigen, CD25 antigen and/or MUC1 antigen; or a combination thereof.
[0406] a linker with a SEQ ID NO:38, SEQ ID NO:39 or SEQ ID NO:40; and,
[0407] a transmembrane domain
[0408] an intracellular domain comprising a sequence selected from the list consisting of SEQ ID NO: 33 (human TR10D), SEQ ID NO: 34 (human TR10A) and SEQ ID NO: 35 (human TR10B).

[0409] In another embodiment, the N-CAR of the invention comprises at least:
[0410] an extracellular domain comprising an at least one scFv from an antibody binding specifically to an antigen selected from CD4 antigen, CD20 antigen, CD22 antigen, CD25 antigen and/or MUC1 antigen;
[0411] a linker with a SEQ ID NO:38, SEQ ID NO:39 or SEQ ID NO:40; and,
[0412] an intracellular domain comprising a sequence with more than 80%, preferably 90% and more preferably 95% identity with SEQ ID NO: 33 (human TR10D), SEQ ID NO: 34 (human TR10A) and SEQ ID NO: 35 (human TR10B).

[0413] In another embodiment, the N-CAR of the invention comprises at least:
[0414] an extracellular domain comprising at least one scFv from an antibody binding specifically to an antigen selected from CD4 antigen, CD20 antigen, CD22 antigen, CD25 antigen and/or MUC1 antigen;
[0415] a linker with a SEQ ID NO:38, SEQ ID NO:39 or SEQ ID NO:40; and,
[0416] an intracellular domain comprising a sequence with more than more than 80%, preferably 90% and more preferably 95% identity with SEQ ID NO: 1 (human KI2L2), SEQ ID NO: 2 (human KI2L1), SEQ ID NO:3 (human FCG2B), SEQ ID NO:4 (human KI2L3), SEQ ID NO: 5 (human KI3L2), SEQ ID NO:6 (human KI2L4), SEQ ID NO:7 (human KI3L1), SEQ ID NO:8 (human KI2LA), SEQ ID NO:9 (human MILR1), SEQ ID NO:10 (human LIRB4), SEQ ID NO:11 (human LIRB3), SEQ ID NO:12 (human KI3L3), SEQ ID NO:15 (human LIRB5), SEQ ID NO:16 (human LIRB2), SEQ ID NO:18 (human FCRL4), SEQ ID NO:23 (human FCRL5), SEQ ID NO:24 (human FCRL2), SEQ ID NO: 25 (human FCRL1), SEQ ID NO:27 (human FCRL3), SEQ ID NO:28 (human MPZL1), SEQ ID NO:29 (human PILRA) or SEQ ID NO:30 (human PVR).

[0417] In another embodiment, the N-CAR of the invention comprises at least:
[0418] an extracellular domain comprising at least one scFv from an antibody binding specifically to an antigen selected from CD4 antigen, CD20 antigen, CD22 antigen, CD25 antigen and/or MUC1 antigen;
[0419] a linker with a SEQ ID NO:38, SEQ ID NO:39 or SEQ ID NO:40; and,
[0420] a transmembrane domain,
[0421] an intracellular domain comprising a sequence selected from the list consisting of SEQ ID NO: 1 (human KI2L2), SEQ ID NO: 2 (human KI2L1), SEQ ID NO:3 (human FCG2B), SEQ ID NO:4 (human KI2L3), SEQ ID NO: 5 (human KI3L2), SEQ ID NO:6 (human KI2L4), SEQ ID NO:7 (human KI3L1), SEQ ID NO:8 (human KI2LA), SEQ ID NO:9 (human MILR1), SEQ ID NO:10 (human LIRB4), SEQ ID NO:11 (human LIRB3), SEQ ID NO:12 (human KI3L3), SEQ ID NO:15 (human LIRB5), SEQ ID NO:16 (human LIRB2), SEQ ID NO:18 (human FCRL4), SEQ ID NO:23 (human FCRL5), SEQ ID NO:24 (human FCRL2), SEQ ID NO: 25 (human FCRL1), SEQ ID NO:27 (human FCRL3), SEQ ID NO:28 (human MPZL1), SEQ ID NO:29 (human PILRA) or SEQ ID NO:30 (human PVR).

[0422] In another embodiment, the N-CAR of the invention comprises at least:
[0423] an extracellular domain comprising at least one scFv from an antibody binding specifically to an antigen selected from CD4 antigen, CD20 antigen, CD22 antigen, CD25 antigen and/or MUC1 antigen;
[0424] a linker with a SEQ ID NO:38, SEQ ID NO:39 or SEQ ID NO:40; and,
[0425] an intracellular domain comprising a sequence of SEQ ID NO:36 (CD200 receptor 1).

[0426] In another embodiment, N-CAR of the invention comprises at least:
[0427] an extracellular domain comprising at least one scFv from an antibody binding specifically to an antigen selected from CD4 antigen, CD20 antigen, CD22 antigen, CD25 antigen and/or MUC1 antigen-a linker with a SEQ ID NO:38, SEQ ID NO:39 or SEQ ID NO:40; and,
[0428] an intracellular domain comprising a sequence with more than more than 80%, preferably 90% and more preferably 95% identity with SEQ ID NO:36 (CD200 receptor 1).

[0429] For instance for the treatment of multiple myeloma (MM), when the antigen targeted by the P-CAR is CD38, said extra-binding domain of the N-CAR binds to at least one “off-target” antigen expressed on healthy cells may be chosen amongst an antigen selected from CD56 antigen (expressed on the surface of neurons, glia, skeletal muscle and natural killer cells), CD205 antigen (expressed on cortical thymic epithelial cells and by dendritic cell (DC) subsets), CD83 antigen (expressed on activated lymphocytes, Langerhans cells and interdigitating reticulum cells), CD206 antigen (expressed on the surface of macrophages and dendritic cells, on the surface of skin cells such as human dermal fibroblasts and keratinocytes); CD200 antigen (expression on cells originating from the hematopoietic cells, activated T cells, endothelial neuronal cells and cells of the reproductive organs-ovaries and placental trophoblasts-); CD36 antigen (expressed in adipocytes endothelial cells and monocytes); RARRES1 antigen (expressed of this gene upregulated by tazarotene as well as by retinoic acid receptors)

[0430] For instance for the treatment of multiple myeloma (MM), when the antigen targeted by the P-CAR is CD22, said extra-binding domain of the N-CAR binds to at least one “off-target” antigen expressed on healthy cells may be chosen amongst an antigen selected from CD56 antigen (expressed on the surface of neurons, glia, skeletal muscle and natural killer cells), CD205 antigen (expressed on cortical thymic epithelial cells and by dendritic cell (DC) subsets), CD83 antigen (expressed on activated lymphocytes, Langerhans cells and interdigitating reticulum cells), CD206 antigen (expressed on the surface of macrophages and dendritic cells, on the surface of skin cells such as human dermal fibroblasts and keratinocytes); CD200 antigen (expression on cells originating from the hematopoietic cells, activated T cells, endothelial neuronal cells and cells of the reproductive organs-ovaries and placental trophoblasts-); CD36 antigen (expressed in adipocytes endothelial cells and monocytes); RARRES1 antigen (expressed of this gene upregulated by tazarotene as well as by retinoic acid receptors)

[0431] Therefore, in one embodiment, the N-CARs of the invention comprises at least:
[0432] an extracellular domain comprising at least one scFv from an antibody binding specifically to an antigen selected from CD56 antigen, CD205 antigen, CD83 antigen, CD206 antigen; CD200 antigen; CD36 antigen and/or RARRES1 antigen,
[0433] a linker with a SEQ ID NO:38, SEQ ID NO:39 or SEQ ID NO:40; and,
[0434] an intracellular domain comprising a sequence with more than 80%, preferably 90% and more preferably 95% identity with SEQ ID NO: 33 (human TR10D), SEQ ID NO: 34 (human TR10A) and SEQ ID NO: 35 (human TR10B).

[0435] In one embodiment, the N-CAR of the invention comprises at least:
[0436] an extracellular domain comprising at least one scFv from an antibody binding specifically to an antigen selected from CD56 antigen, CD205 antigen, CD83 antigen, CD206 antigen; CD200 antigen; CD36 antigen and/or RARRES1 antigen;
[0437] a linker with a SEQ ID NO:38, SEQ ID NO:39 or SEQ ID NO:40; and,
[0438] an intracellular domain comprising a sequence selected from the list consisting of SEQ ID NO: 33 (human TR10D), SEQ ID NO: 34 (human TR10A) or SEQ ID NO: 35 (human TR10B),

[0439] In another embodiment, the N-CAR of the invention comprises at least:
[0440] an extracellular domain comprising at least one scFv from an antibody binding specifically to an antigen selected from CD56 antigen, CD205 antigen, CD83 antigen, CD206 antigen; CD200 antigen; CD36 antigen and/or RARRES1 antigen;
[0441] a linker with a SEQ ID NO:38, SEQ ID NO:39 or SEQ ID NO:40; and,
[0442] an intracellular domain comprising a sequence with more than more than 80%, preferably 90% and more preferably 95% identity with SEQ ID NO: 1 (human KI2L2), SEQ ID NO: 2 human KI2L1), SEQ ID NO:3 (human FCG2B), SEQ ID NO:4 (human KI2L3), SEQ ID NO: 5 (human KI3L2), SEQ ID NO:6 (human KI2L4), SEQ ID NO:7 (human KI3L1), SEQ ID NO:8 (human KI2LA), SEQ ID NO:9 (human MILR1), SEQ ID NO:10 (human LIRB4), SEQ ID NO:11 (human LIRB3), SEQ ID NO:12 (human KI3L3), SEQ ID NO:15 (human LIRB5), SEQ ID NO:16 (human LIRB2), SEQ ID NO:18 (human FCRL4), SEQ ID NO:23 (human FCRL5), SEQ ID NO:24 (human FCRL2), SEQ ID NO: 25 (human FCRL1), SEQ ID NO:27 (human FCRL3), SEQ ID NO:28 (human MPZL1), SEQ ID NO:29 (human PILRA) or SEQ ID NO:30 (human PVR).

[0443] In another embodiment, the N-CAR of the invention comprises at least:
[0444] an extracellular domain comprising at least one scFv from an antibody binding specifically to an antigen selected from CD56 antigen, CD205 antigen, CD83 antigen, CD206 antigen; CD200 antigen; CD36 antigen and/or RARRES1 antigen; —a linker with a SEQ ID NO:38, SEQ ID NO:39 or SEQ ID NO:40; and,
[0445] an intracellular domain comprising a sequence selected from the list consisting of SEQ ID NO: 1 (human KI2L2), SEQ ID NO: 2 (human KI2L1), SEQ ID NO:3 (human FCG2B), SEQ ID NO:4 (human KI2L3), SEQ ID NO: 5 (human KI3L2), SEQ ID NO:6 (human KI2L4), SEQ ID NO:7 (human KI3L1), SEQ ID NO:8 (human KI2LA), SEQ ID NO:9 (human MILR1), SEQ ID NO:10 (human LIRB4), SEQ ID NO:11 (human LIRB3), SEQ ID NO:12 (human KI3L3), SEQ ID NO:15 (human LIRB5), SEQ ID NO:16 (human LIRB2), SEQ ID NO:18 (human FCRL4), SEQ ID NO:23 (human FCRL5), SEQ ID NO:24 (human FCRL2), SEQ ID NO: 25 (human FCRL1), SEQ ID NO:27 (human FCRL3), SEQ ID NO:28 (human MPZL1), SEQ ID NO:29 (human PILRA) or SEQ ID NO:30 (human PVR).

[0446] In another embodiment, the N-CAR of the invention comprises at least:
[0447] an extracellular domain comprising at least one scFv from an antibody binding specifically to an antigen selected from CD56 antigen, CD205 antigen, CD83 antigen, CD206 antigen; CD200 antigen; CD36 antigen and/or RARRES1 antigen;
[0448] a linker with a SEQ ID NO:38, SEQ ID NO:39 or SEQ ID NO:40; and,
[0449] an intracellular domain comprising a sequence with more than more than 80%, preferably 90% and more preferably 95% identity with SEQ ID NO:36 (CD200 receptor 1).

[0450] In another embodiment, the N-CAR of the invention comprises at least:
[0451] an extracellular domain comprising at least one scFv from antibodies binding specifically to an antigen selected from CD56 antigen, CD205 antigen, CD83 antigen, CD206 antigen; CD200 antigen; CD36 antigen and/or RARRES1 antigen;
[0452] a linker with a SEQ ID NO:38, SEQ ID NO:39 or SEQ ID NO:40; and,
[0453] an intracellular domain comprising a sequence of SEQ ID NO:36 (CD200 receptor 1).

[0454] For instance for the treatment of chronic lymphocytic leukemia (CLL), when the antigen targeted by the P-CAR is CS1, said extra-binding domain of the N-CAR binds to “off-target” antigens expressed on healthy cells that may be chosen amongst troponin C antigen (expressed in heart); beta-1 integrin antigen (expressed in endothelial cells and fibroblasts, intestine, colon, testis, ovary, thymus, spleen and prostate); CCKBR antigen (expression in stomach, pancreas, brain and gallbladder); GALR1 antigen (expressed in adrenal gland); and CUBN antigen (expressed in kidney and small intestine).

[0455] Therefore, in one embodiment, the N-CAR of the invention may comprise at least:
[0456] an extracellular domain comprising at least one scFv from an antibody binding specifically to an antigen selected from troponin C antigen; beta-1 integrin antigen; CCKBR antigen; GALR1 antigen and CUBN antigen;
[0457] a linker with a SEQ ID NO:38, SEQ ID NO:39 or SEQ ID NO:40; and,
[0458] an intracellular domain comprising a sequence with more than 80%, preferably 90% and more preferably 95% identity with SEQ ID NO: 33 (human TR10D), SEQ ID NO: 34 (human TR10A) or SEQ ID NO: 35 (human TR10B).

[0459] In one embodiment, the N-CAR of the invention comprises at least:
[0460] an extracellular domain comprising at least one scFv from an antibody binding specifically to an antigen selected from troponin C antigen beta-1 integrin antigen; CCKBR antigen; GALR1 antigen and/or CUBN antigen;
[0461] a linker with a SEQ ID NO:38, SEQ ID NO:39 or SEQ ID NO:40; and,
[0462] an intracellular domain comprising a sequence selected from the list consisting of SEQ ID NO: 33 (human TR10D), SEQ ID NO: 34 (human TR10A) or SEQ ID NO: 35 (human TR10B).

[0463] In another embodiment, the N-CAR of the invention comprises at least:
[0464] an extracellular domain comprising at least one scFv from an antibody binding specifically to an antigen selected from troponin C antigen beta-1 integrin antigen; CCKBR antigen; GALR1 antigen and/or CUBN antigen;
[0465] a linker with a SEQ ID NO:38, SEQ ID NO:39 or SEQ ID NO:40; and,
[0466] an intracellular domain comprising a sequence with more than more than 80%, preferably 90% and more preferably 95% identity with SEQ ID NO: 1 (human KI2L2), SEQ ID NO: 2 human KI2L1), SEQ ID NO:3 (human FCG2B), SEQ ID NO:4 (human KI2L3), SEQ ID NO: 5 (human KI3L2), SEQ ID NO:6 (human KI2L4), SEQ ID NO:7 (human KI3L1), SEQ ID NO:8 (human KI2LA), SEQ ID NO:9 (human MILR1), SEQ ID NO:10 (human LIRB4), SEQ ID NO:11 (human LIRB3), SEQ ID NO:12 (human KI3L3), SEQ ID NO:15 (human LIRB5), SEQ ID NO:16 (human LIRB2), SEQ ID NO:18 (human FCRL4), SEQ ID NO:23 (human FCRL5), SEQ ID NO:24 (human FCRL2), SEQ ID NO: 25 (human FCRL1), SEQ ID NO:27 (human FCRL3), SEQ ID NO:28 (human MPZL1), SEQ ID NO:29 (human PILRA) or SEQ ID NO:30 (human PVR).

[0467] In another embodiment, the N-CAR of the invention comprises at least:
[0468] an extracellular domain comprising at least one scFv from an antibody binding specifically to an antigen selected from troponin C antigen, beta-1 integrin antigen; CCKBR antigen; GALR1 antigen and/or CUBN antigen;
[0469] a linker with a SEQ ID NO:38, SEQ ID NO:39 or SEQ ID NO:40; and,
[0470] an intracellular domain comprising a sequence selected from the list consisting of SEQ ID NO: 1 (human KI2L2), SEQ ID NO: 2 (human KI2L1), SEQ ID NO:3 (human FCG2B), SEQ ID NO:4 (human KI2L3), SEQ ID NO: 5 (human KI3L2), SEQ ID NO:6 (human KI2L4), SEQ ID NO:7 (human KI3L1), SEQ ID NO:8 (human KI2LA), SEQ ID NO:9 (human MILR1), SEQ ID NO:10 (human LIRB4), SEQ ID NO:11 (human LIRB3), SEQ ID NO:12 (human KI3L3), SEQ ID NO:15 (human LIRB5), SEQ ID NO:16 (human LIRB2), SEQ ID NO:18 (human FCRL4), SEQ ID NO:23 (human FCRL5), SEQ ID NO:24 (human FCRL2), SEQ ID NO: 25 (human FCRL1), SEQ ID NO:27 (human FCRL3), SEQ ID NO:28 (human MPZL1), SEQ ID NO:29 (human PILRA) or SEQ ID NO:30 (human PVR).

[0471] In another embodiment, the N-CAR of the invention comprises at least:
[0472] an extracellular domain comprising at least one scFv from an antibody binding specifically to an antigen selected from troponin C antigen, beta-1 integrin antigen; CCKBR antigen; GALR1 antigen and/or CUBN antigen;
[0473] a linker with a SEQ ID NO:38, SEQ ID NO:39 or SEQ ID NO:40; and,
[0474] an intracellular domain comprising a sequence with more than 80%, preferably 90% and more preferably 95% identity with SEQ ID NO:36 (CD200 receptor 1).

[0475] In another embodiment, the N-CAR of the invention comprises at least:
[0476] an extracellular domain comprising at least one scFv from an antibody binding specifically to an antigen selected from troponin C antigen (; beta-1 integrin antigen; CCKBR antigen; GALR1 antigen and/or CUBN antigen;
[0477] a linker with a SEQ ID NO:38, SEQ ID NO:39 or SEQ ID NO:40; and,
[0478] an intracellular domain comprising a sequence of SEQ ID NO:36 (CD200 receptor 1).

[0479] For instance for the treatment of chronic lymphocytic leukemia (CLL) or a solid tumor, when the antigen targeted by the P-CAR is ROR1, said extra-binding domain of the N-CAR binds to at least one “off-target” antigen expressed on healthy cells selected from the list consisting of troponin C antigen (expressed in heart); beta-1 integrin antigen (expressed in endothelial cells and fibroblasts, intestine, colon, testis, ovary, thymus, spleen and prostate); CCKBR antigen (expression in stomach, pancreas, brain and gallbladder); GALR1 antigen (expressed in adrenal gland) or MUC1 antigen (expressed in kidney).

[0480] Therefore, in one embodiment, the N-CAR of the invention comprises at least:
[0481] an extracellular domain comprising at least one scFv from an antibody binding specifically to an antigen selected from troponin C antigen (; beta-1 integrin antigen; CCKBR antigen; GALR1 antigen and/or MUC antigen;
[0482] a linker with a SEQ ID NO:38, SEQ ID NO:39 or SEQ ID NO:40; and,
[0483] an intracellular domain comprising a sequence with more than 80%, preferably 90% and more preferably 95% identity with SEQ ID NO: 33 (human TR10D), SEQ ID NO: 34 (human TR10A) and SEQ ID NO: 35 (human TR10B).

[0484] In one embodiment, the N-CAR of the invention comprises at least:
[0485] an extracellular domain comprising at least one scFv from an antibody binding specifically to an antigen selected from troponin C antigen (; beta-1 integrin antigen; CCKBR antigen; GALR1 antigen and/or MUC antigen;
[0486] a linker with a SEQ ID NO:38, SEQ ID NO:39 or SEQ ID NO:40; and,
[0487] an intracellular domain comprising a sequence selected from the list consisting of SEQ ID NO: 33 (human TR10D), SEQ ID NO: 34 (human TR10A) or SEQ ID NO: 35 (human TR10B)

[0488] In another embodiment, N-CARs of the invention may comprise at least:
[0489] an extracellular domain comprising at least one scFv from an antibody binding specifically to an antigen selected from troponin C antigen (; beta-1 integrin antigen; CCKBR antigen; GALR1 antigen and/or MUC antigen;
[0490] a linker with a SEQ ID NO:38, SEQ ID NO:39 or SEQ ID NO:40; and,
[0491] an intracellular domain comprising a sequence with more than more than 80%, preferably 90% and more preferably 95% identity with SEQ ID NO: 1 (human KI2L2), SEQ ID NO: 2 human KI2L1), SEQ ID NO:3 (human FCG2B), SEQ ID NO:4 (human KI2L3), SEQ ID NO: 5 (human KI3L2), SEQ ID NO:6 (human KI2L4), SEQ ID NO:7 (human KI3L1), SEQ ID NO:8 (human KI2LA), SEQ ID NO:9 (human MILR1), SEQ ID NO:10 (human LIRB4), SEQ ID NO:11 (human LIRB3), SEQ ID NO:12 (human KI3L3), SEQ ID NO:15 (human LIRB5), SEQ ID NO:16 (human LIRB2), SEQ ID NO:18 (human FCRL4), SEQ ID NO:23 (human FCRL5), SEQ ID NO:24 (human FCRL2), SEQ ID NO: 25 (human FCRL1), SEQ ID NO:27 (human FCRL3), SEQ ID NO:28 (human MPZL1), SEQ ID NO:29 (human PILRA) or SEQ ID NO:30 (human PVR).

[0492] In another embodiment, the N-CAR of the invention comprises at least:
[0493] an extracellular domain comprising at least one scFv from an antibody binding specifically to an antigen selected from troponin C antigen (; beta-1 integrin antigen; CCKBR antigen; GALR1 antigen and/or MUC antigen;
[0494] a linker with a SEQ ID NO:38, SEQ ID NO:39 or SEQ ID NO:40; and,
[0495] an intracellular domain comprising a sequence selected from the list consisting of SEQ ID NO: 1 (human KI2L2), SEQ ID NO: 2 (human KI2L1), SEQ ID NO:3 (human FCG2B), SEQ ID NO:4 (human KI2L3), SEQ ID NO: 5 (human KI3L2), SEQ ID NO:6 (human KI2L4), SEQ ID NO:7 (human KI3L1), SEQ ID NO:8 (human KI2LA), SEQ ID NO:9 (human MILR1), SEQ ID NO:10 (human LIRB4), SEQ ID NO:11 (human LIRB3), SEQ ID NO:12 (human KI3L3), SEQ ID NO:15 (human LIRB5), SEQ ID NO:16 (human LIRB2), SEQ ID NO:18 (human FCRL4), SEQ ID NO:23 (human FCRL5), SEQ ID NO:24 (human FCRL2), SEQ ID NO: 25 (human FCRL1), SEQ ID NO:27 (human FCRL3), SEQ ID NO:28 (human MPZL1), SEQ ID NO:29 (human PILRA) or SEQ ID NO:30 (human PVR).

[0496] In another embodiment, the N-CAR of the invention comprises at least:
[0497] an extracellular domain comprising at least one scFv from an antibody binding specifically to an antigen selected from troponin C antigen (; beta-1 integrin antigen; CCKBR antigen; GALR1 antigen and/or MUC antigen.

[0498] In other embodiments, the N-CAR of the present invention is a transmembrane polypeptide containing at least:
[0499] an extracellular binding domain;
[0500] an intracellular domain comprising an inhibitory transduction domain,

[0501] wherein said inhibitory transduction domain of intracellular domain is used alone, fused to a separately chosen transmembrane domain, optionally, the latter being fused to the extracellular binding domain by a hinge.

[0502] Transmembrane Domain

[0503] In one embodiment, the transmembrane domain comprises the transmembrane region(s) of the alpha, beta or zeta chain of the T-cell receptor, PD-1, 4-16B, OX40, ICOS, CTLA-4, LAG3, 2B4, BTLA4, TIM-3, TIGIT, SIRPA, CD28, CD3 epsilon, CD45, CD4, CD5, CD8, CD9, CD16, CD22, CD33, CD37, CD64, CD80, CD86, CD134, CD137 or CD154.

[0504] The distinguishing features of appropriate transmembrane domains comprise the ability to be expressed at the surface of a cell, preferably in the present invention an immune cell, in particular lymphocyte cells or Natural killer (NK) cells, and to interact together for directing cellular response of immune cell against a predefined target cell. The transmembrane domain can be derived either from a natural or from a synthetic source. The transmembrane domain can be derived from any membrane-bound or transmembrane protein. As non-limiting examples, the transmembrane polypeptide can be a subunit of the T cell receptor such as α, β, [symbol] or [symbol] , polypeptide constituting CD3 complex, IL2 receptor p55 (α chain), p75 (β chain) or [symbol] chain, subunit chain of Fc receptors, in particular Fc [symbol] receptor III or CD proteins. Alternatively the transmembrane domain can be synthetic and can comprise predominantly hydrophobic residues such as leucine and valine. In a preferred embodiment said transmembrane domain is derived from the human CD8 alpha chain (e.g. NP_001139345.1). Said transmembrane domain can also be a CD8 transmembrane domain (alpha and beta chains). Said Transmembrane domain can be engineered to create obligated hetero or homodimers. In particular embodiment said CARs can comprise transmembrane domains or intracellular domains which can only dimerize after ligand recognition. Another example of transmembrane domain can be NKG2-D receptor. NKG2D (natural killer cell group 2D) is a C-type lectin-like receptor expressed on NK cells, γδ-TcR⁺ T cells, and CD8⁺αβ-TcR⁺ T cells (Bauer, Groh et al., 1999, Science 285(5428):727-9. NKG2D is associated with the transmembrane adapter protein DAP10 (Wu, Song et al. 1999, Science 285(5428):730-2), whose cytoplasmic domain binds to the p 85 subunit of the PI-3 kinase.

[0505] Another example of transmembrane domain can be a receptor tyrosine kinase. Receptor tyrosine kinase are cell surface receptors involved in different critical cellular regulatory process including cell proliferation, cell differentiation, cell survival, cell migration, as well as cell cycle control. Receptor tyrosine kinase comprises an extracellular domain, a single transmembrane helix and an intracellular domain comprising tyrosine kinase function that is most of time autoregulated by additional carboxy-terminal and juxtamembrane domains. Activation of receptor tyrosine kinase is generally elicited by ligand-mediated dimerization. Thanks to their bivalence, growth hormone ligand has the capacity to simultaneously interact with two receptor monomers and promotes dimerization. Such dimerization induces the activation of intracellular kinase domains through conformational changes followed by trans-phosphorylation of different tyrosines located within their intracellular domain. The different phosphotyrosines generated eventually serve as docking site for the recruitment of downstream signaling partners that activate the cellular regulatory pathways. Said CAR can comprise the extracellular domain, transmembrane, and/or the intracellular domain of a receptor tyrosine kinase, preferably selected from the group consisting of TrkA, c-Kit, FGFR and EGFR/Erb. Said tyrosine kinase transmembrane domain and/or intracellular domain can be linked to an extracellular ligand binding domain and intracellular domain according to the present invention. Said engineered cells may comprise different N- and P-CAR comprising different transmembrane domains.

[0506] Said transmembrane domain can also be an integrin. Integrins are heterodimeric integral membrane proteins composed of a [symbol] and [symbol] [symbol] chains which combined together form the LFA-1 (integrin lymphocyte function-associated antigen-1) which is expressed on all leukocytes. LFA-1 plays a central role in leukocyte intercellular adhesion through interactions with its ligand, ICAMs 1-3 (intercellular adhesion molecules 1 through 3), and also it has an important role in lymphocyte co-stimulatory signaling (Chen and Flies 2013, Nat Rev Immunol 13(4):227-42). The molecular details of the binding of LAF-1 to its immunoglobulin ICAM-1 are quite known allowing a careful engineering of LAF-1 binding site. The affinity of [symbol] _{L} domain for ICAM-1 is regulated by the displacement of its C-terminal helix which is conformational linked to alterations of specific loops in LAF-1. The active and low conformations differ of 500 and 10,000 folds. It is also interesting to note that two types of antagonists are known for LFA-1 and their mechanism of action is known. Integrin cell surface adhesion receptors can transmit a signal from the outside to inside but also vice-versa. There are cytoskeletal proteins as Talin which binds to the integrin tail LFA-1 to transfer a message from inside to outside.

[0507] According to one embodiment, the transmembrane domain comprises the transmembrane region of PD-1 or the transmembrane region(s) of CD8 alpha.

[0508] According to one preferred embodiment, the transmembrane domain comprises the transmembrane region of CD8 alpha. In one aspect of the invention, the transmembrane domain is attached to the extracellular domain of the N-CAR via a hinge.

[0509] Hinge

[0510] In a preferred embodiment, in the hinge of the N-CAR is a human immunoglobulin hinge.

[0511] In a more preferred embodiment, the hinge of the N-CAR is an IgG1 hinge or a CD8 alpha hinge.

[0512] The term “stalk region” (also named hinge region) used herein generally means any oligo- or polypeptide that functions to link the transmembrane domain to the extracellular ligand-binding domain. In particular, stalk region are used to provide more flexibility and accessibility for the extracellular ligand-binding domain. A stalk region may comprise up to 300 amino acids, preferably 10 to 100 amino acids and most preferably 25 to 50 amino acids. Stalk region may be derived from all or part of naturally occurring molecules, such as from all or part of the extracellular region of CD8, CD4, CD28 or RTK, or from all or part of an antibody constant region. Alternatively the stalk region may be a synthetic sequence that corresponds to a naturally occurring stalk sequence, or may be an entirely synthetic stalk sequence.

[0513] The present invention encompasses a recombinant DNA construct comprising sequences encoding an N-CAR as defined above, wherein the N-CAR comprises an extracellular domain such as an antibody fragment that binds specifically to an off-tumor antigen, and wherein the sequence of the extracellular domain is contiguous with and in the same reading frame as a nucleic acid sequence encoding a transmembrane domain and an intracellular domain. An exemplary N-CAR construct may comprise an optional leader sequence, an extracellular off-tissue antigen binding domain, a hinge, a transmembrane domain, and an intracellular inhibitory signaling domain.

[0514] According to one preferred embodiment, a hinge according to the invention comprises the a sequence from IgG1 or from CD8 alpha, preferably of SEQ ID NO. 51 and 50.

[0515] Engineered Immune Cells

[0516] In one aspect the present invention provides an immune cell comprising at least one N-CAR according to the invention (as described above).

[0517] In one aspect the present invention provides an immune cell comprising at least one N-CAR according to the invention (as described above) and at least one P-CAR, according to the invention.

[0518] In one aspect of the invention, an isolated immune cell comprises a P-CAR comprising:
[0519] an extracellular domain comprising an antigen binding domain;
[0520] a transmembrane domain;
[0521] an intracellular domain;

[0522] and an N-CAR as described previously.

[0523] The present invention encompasses an immune cell comprising a single chain (sc) or a multi chain (mc) N-CAR and a sc P-CAR.

[0524] The present invention encompasses an immune cell comprising a single chain (sc) or a multi chain (mc) N-CAR and a mc P-CAR.

[0525] The present invention encompasses an immune cell comprising a single chain (sc) N-CAR and a sc P-CAR.

[0526] The present invention encompasses an immune cell comprising a multi chain (mc) N-CAR and a sc P-CAR.

[0527] The present invention encompasses an immune cell comprising a multi chain (mc) N-CAR and a mc P-CAR. The present invention also relates to isolated cells or cell lines susceptible to be obtained by said method to engineer cells.

[0528] The present invention also relates to isolated cells or cell lines susceptible to be obtained by a method to engineer cells according to the present invention.

[0529] Said immune cell refers to a cell of hematopoietic origin functionally involved in the initiation and/or execution of innate and/or adaptive immune response. Said immune cell according to the present invention can be derived from a stem cell. The stem cells can be adult stem cells, non-human embryonic stem cells, more particularly non-human stem cells, cord blood stem cells, progenitor cells, bone marrow stem cells, induced pluripotent stem cells, totipotent stem cells or hematopoietic stem cells. Representative human cells are CD34+ cells. Said isolated cell can also be a dendritic cell, killer dendritic cell, a mast cell, a NK-cell, a B-cell or a T cell. Said isolated cell may comprise a population of N-CARs and CARs each one comprising different extracellular ligand binding domains. In particular, said isolated cell comprises exogenous polynucleotide sequence encoding N-CAR and P-CAR.

[0530] In one preferred embodiment, said isolated cell comprising at least one N-CAR and one CAR as described above is a T-cell.

[0531] In a more preferred embodiment, said isolated cell comprising at least one N-CAR and one CAR as described above is a human T-cell.

[0532] In a preferred embodiment, isolated immune cell is selected from the group consisting of inflammatory T-lymphocytes, cytotoxic T-lymphocytes, regulatory T-lymphocytes or helper T-lymphocytes.

[0533] Said cell may be derived from the group consisting of CD4+ T-lymphocytes and CD8+ T-lymphocytes. Prior to expansion and genetic modification of the cells of the invention, a source of cells can be obtained from a subject through a variety of non-limiting methods. Cells can be obtained from a number of non-limiting sources, including peripheral blood mononuclear cells, bone marrow, lymph node tissue, cord blood, thymus tissue, tissue from a site of infection, ascites, pleural effusion, spleen tissue, and tumors. In certain embodiments of the present invention, any number of T cell lines available and known to those skilled in the art, may be used.

[0534] In one embodiment, said isolated immune cells are recovered from a healthy donor.

[0535] In another embodiment, said isolated immune cells are recovered from a patient diagnosed with cancer or from a patient diagnosed with an infection.

[0536] Said cells may part of a mixed population of cells which present different phenotypic characteristics. In the scope of the present invention is also encompassed a cell line obtained from a transformed T− cell according to the method previously described.

[0537] According to one embodiment, the antigen to which the antigen binding domain of the P-CAR binds is CD38 and the antigen to which the antigen binding domain of the N-CAR binds is an antigen selected from the list consisting of CD56, CD205, CD83, CD206, CD200 and CD36.

[0538] According to one embodiment, the antigen to which the antigen binding domain of the P-CAR binds is CD19 and the antigen to which the antigen binding domain of the N-CAR binds is an antigen selected from the list consisting of CD56, CD205, CD83, CD206, CD200 and CD36.

[0539] According to one embodiment, the antigen to which the antigen binding domain of the P-CAR binds is CD20 and the antigen to which the antigen binding domain of the N-CAR binds is an antigen selected from the list consisting of CD56, CD205, CD83, CD206, CD200 and CD36.

[0540] According to one embodiment, the antigen to which the antigen binding domain of the P-CAR binds is PCMA and the antigen to which the antigen binding domain of the N-CAR binds is an antigen selected from the list consisting of CD56, CD205, CD83, CD206, CD200 and CD36.

[0541] According to another embodiment, the antigen binding domain of the P-CAR binds is CS1 and the antigen to which the antigen binding domain of the N-CAR binds is an antigen selected from the list consisting of troponin C, beta-1 integrin, CCKBR, GALR1 or CUBN.

[0542] According to another embodiment, the antigen to which the antigen binding domain of the P-CAR binds is CD123 and the antigen to which the antigen binding domain of the N-CAR binds is an antigen selected from the list consisting of CD4, CD20, CD22, CD25 or MUC1.

[0543] According to another embodiment, the antigen to which the antigen binding domain of the P-CAR binds is ROR1 and the antigen to which the antigen binding domain of the N-CAR binds is an antigen selected from the list consisting of troponin C, beta-1 integrin, CCKBR, GALR1 or MUC1.

[0544] Positive Chimeric Antigen Receptor (P-CAR)

[0545] The present invention relates to “logical NOT” gates that involve, beside the above described N-CAR, at least one P-CAR which enable the engineered immune cell to trigger the destruction of tumoral targeted cells.

[0546] The P-CAR used within the scope of the invention can be a single-chain or a multi-chain CAR.

[0547] In one embodiment, the P-CAR is a single CAR; it comprises one transmembrane polypeptide comprising at least one extracellular ligand-binding domain and one extracellular domain comprising a signal-transducing domain.

[0548] In some embodiments, the immune cell comprises a multi-chain P-CAR as defined in WO2014/039523 which is incorporated herein by reference in its entirety

[0549] By multi-chain CAR is meant a CAR structure that comprises different polypeptides such as at least (1) a transmembrane polypeptide which comprises at least one extracellular ligand binding domain; and (2) a transmembrane polypeptide comprising at least one transduction domain such that said at least two polypeptides assemble together to form a functional multi-chain Chimeric Antigen Receptor (WO2014039523).

[0550] In another embodiment, this P-CAR is a multichain CAR such as described in WO2014039523, it comprises at least:
[0551] one transmembrane polypeptide comprising at least one extracellular ligand-binding domain and;
[0552] one transmembrane polypeptide comprising at least one signal-transducing domain.

[0553] For instance, said multi-chain CAR can comprise at least two of the following components:

[0554] a) one polypeptide comprising the transmembrembrane domain of FcsRI alpha chain fused to an extracellular ligand-binding domain,

[0555] b) one polypeptide comprising a part of N- and C-terminal cytoplasmic tail fused to the transmembrane domain of a FcRI beta chain, and/or

[0556] c) two additional polypeptides comprising each one part of an intracytoplasmic tail and/or the transmembrane domain of FcRI gamma chain,

[0557] whereby these different polypeptides multimerize together spontaneously to form dimeric, trimeric or tetrameric CARs.

[0558] In a preferred embodiment said chain are not covalently linked.

[0559] Example of a tetrameric P-CARs are illustrated in FIG. 3 of WO2013176915 and different versions of multichain P-CARs are represented in FIG. 4 of WO2013176915. Such P-CAR can be expressed in a T-cell obtained using the above disclosed method together with a N-CAR according to the present disclosure to obtain a T-cell according to the invention.

[0560] In some embodiment the invention relates to an immune cell comprising a N-CAR as defined herein and a P-CAR as defined in any of U.S. Pat. No. 7,446,190, WO2008/121420, U.S. Pat. No. 8,252,592, US20140024809, WO2012/079000, WO2014153270, WO2012/099973, WO2014/011988, WO2014/011987, WO2013/067492, WO2013/070468, WO2013/040557, WO2013/126712, WO2013/126729, WO 2013/126726, WO2013/126733, U.S. Pat. No. 8,399,645, US20130266551, US20140023674, WO2014039523, U.S. Pat. No. 7,514,537, U.S. Pat. No. 8,324,353, WO2010/025177, U.S. Pat. No. 7,446,179, WO2010/025177, WO2012/031744, WO2012/136231A1, WO2012/050374A2, WO2013074916, WO/2009/091826A3, WO2013/176915 or WO/2013/059593.

[0561] The transmembrane domain of the P-CAR responds to similar criteria that the one explained previously for the N-CAR. Idem for the extracellular ligand-binding domain of P-CAR, excepted the difference of specificity towards its antigen target as presented above.

[0562] A preferred TM is from CD8 alpha, more preferably of SEQ ID NO. 50

[0563] Example of a tetrameric P-CARs are illustrated in FIG. 3 of WO2013176915 and different versions of multichain P-CARs are represented in FIG. 4 of WO2013176915. Such P-CAR can be expressed in a T-cell obtained using the above disclosed method together with a N-CAR according to the present disclosure to obtain a T-cell according to the invention.

[0564] In some embodiment the invention relates to an immune cell comprising a N-CAR as defined herein and a P-CAR as defined in any of U.S. Pat. No. 7,446,190, WO2008/121420, U.S. Pat. No. 8,252,592, US20140024809, WO2012/079000, WO2014153270, WO2012/099973, WO2014/011988, WO2014/011987, WO2013/067492, WO2013/070468, WO2013/040557, WO2013/126712, WO2013/126729, WO 2013/126726, WO2013/126733, U.S. Pat. No. 8,399,645, US20130266551, US20140023674, WO2014039523, U.S. Pat. No. 7,514,537, U.S. Pat. No. 8,324,353, WO2010/025177, U.S. Pat. No. 7,446,179, WO2010/025177, WO2012/031744, WO2012/136231A1, WO2012/050374A2, WO2013074916, WO/2009/091826A3, WO2013/176915 or WO2013/059593.

[0565] The signaling domain of the p-CAR or “signaling protein” according to the invention is involved in the activation of at least one of the normal functions of the engineered immune cell. For example, the function of a T cell can be a cytolytic activity or helper activity including the secretion of cytokines. Thus, the term “signaling protein” refers to a protein which transduces the transmitter domain function signal and directs the cell to perform a specialized function. In a particular embodiment, said signaling domain can be a signaling protein. Transmission of the signals can result from: protein/protein interactions, protein/DNA interaction, protein/RNA interaction, protein/small molecule interaction, post translational protein modification, conformational change, subcellular relocalization.

[0566] The signaling protein can activate a gene in the nucleus. Examples of signaling protein can be members of NFAT transcription factor family which are inducible factor that could bind the intereukin-2 promoter in activated T cells. The regulation of NFAT proteins involves metabolites and proteins such as calcium, calcineurin and Homer scaffolding proteins. Said signaling protein can be an activated engineered form of NFAT avoiding regulation by calcineurin and Homer proteins. Said signaling protein can be a NF-κB engineered to avoid sequestration in the cytoplasm by I [symbol] b allowing activation of T cells. Said signaling protein can also be the expression of the three IKK subunits (IKKα, IKKβ, IKKγ). Reconstituted IKK complex activated NF- [symbol] B pathway, by triggering the ubiquitination of the IκB. Also the activation of the JNK signaling could be triggered through the direct expression of signaling protein AP-1 (transcription factor). Said signaling protein can be an engineered transcription activator like effector (TALE) binding domain that will specifically target and activate transcription of the same gene as for the NFAT and NF-kb.

[0567] According to the invention, said signaling protein can inhibit a signaling pathway through protein-protein interaction or can activate a gene in the nucleus to inhibit a signaling pathway. Said signaling protein can be vaccinia H1 related proteins (VHR) a member of the mitogen-activated protein kinase phosphatases (MKPs) family which dephosphorylates and inactivates an extracellular signal regulated kinases (ERK) signaling proteins.

[0568] According to the invention, a signal transducing domain for use in a P-CAR can be the cytoplasmic sequences of the T cell receptor and co-receptors that act in concert to initiate signal transduction following antigen receptor engagement, as well as any derivate or variant of these sequences and any synthetic sequence that has the same functional capability. Signal transduction domain may comprise two distinct classes of cytoplasmic signaling sequence, those that initiate antigen-dependent primary activation, and those that act in an antigen-independent manner to provide a secondary or co-stimulatory signal.

[0569] Primary cytoplasmic signaling sequence can comprise signaling motifs which are known as immunoreceptor tyrosine-based activation motifs of ITAMs. ITAMs are well defined signaling motifs found in the intracytoplasmic tail of a variety of receptors that serve as binding sites for syk/zap70 class tyrosine kinases. Examples of ITAM used in the invention can include as non limiting examples those derived from TCRzeta, FcRgamma, FcRbeta, FcRepsilon, CD3gamma, CD3delta, CD3epsilon, CD5, CD22, CD79a, CD79b and CD66d. In a preferred embodiment, the signaling transducing domain of a multi-chain CAR according to the invention can comprise a CD3zeta signaling domain, or the intracytoplasmic domain of the FcRI beta or gamma chains.

[0570] In particular embodiment the signal transduction domain of the P-CAR of the present invention comprises a co-stimulatory signal molecule. A co-stimulatory molecule is a cell surface molecule other than an antigen receptor or their ligands that is required for an efficient immune response. “Co-stimulatory ligand” refers to a molecule on an antigen presenting cell that specifically binds a cognate co-stimulatory molecule on a T cell, thereby providing a signal which, in addition to the primary signal provided by, for instance, binding of a TCR/CD3 complex with an MHC molecule loaded with peptide, mediates a T cell response, including, but not limited to, proliferation activation, differentiation and the like. A “co-stimulatory molecule” refers to the cognate binding partner on a T cell that specifically binds with a co-stimulatory ligand, thereby mediating a co-stimulatory response by the cell, such as, but not limited to proliferation. Co-stimulatory molecules include, but are not limited to an MHC class I molecule, BTLA and Toll ligand receptor.

[0571] A co-stimulatory ligand according to the present invention can include but is not limited to CD7, B7-1 (CD80), B7-2 (CD86), PD-L1, PD-L2, 4-1BBL, OX40L, inducible costimulatory igand (ICOS-L), intercellular adhesion molecule (ICAM, CD30L, CD40, CD70, CD83, HLA-G, MICA, M 1CB, HVEM, lymphotoxin beta receptor, 3/TR6, ILT3, ILT4, an agonist or antibody that binds Toll ligand receptor and a ligand that specifically binds with B7-H3. A co-stimulatory ligand also encompasses, inter alia, an antibody that specifically binds with a co-stimulatory molecule present on a T cell, such as but not limited to, CD27, CD28, 4-IBB, OX40, CD30, CD40, PD-1, ICOS, lymphocyte function-associated antigen-1 (LFA-1), CD2, CD7, LTGHT, NKG2C, B7-H3, a ligand that specifically binds with CD83.

[0572] As preferred and exemplary P-CARs which can be used in combination with the N-CARs such as presented above, are those with an extracellular-binding domain recognizing the CD19, CD123, CD38, CS1, ROR1, CLL-1 or CD22 cell surface marker antigen.

[0573] Others P-CARs which can be used in combination with a N-CAR according to the present invention are contemplated within the present invention, such as anti-CD28 CAR, anti-CD30 CAR, anti-CD138 CAR, anti-CD171 CAR, anti-CD19 CAR, anti-CEA CAR (CEA being the carcinoembryonic antigen), anti-ERB B CAR (ligand of HER-2/neu), anti-FAP CAR (Fibroblast activation protein), anti-GD2 CAR, anti-GPC3 CAR (glypican-3 antigen), anti-Lewis-Y CAR (carbohydrate antigen), anti-NKG2D ligand CAR, anti-MSLN CAR (mesothelin antigen), anti-NY-ESO-1 CAR (cancer-testis antigen), anti-PSCA CAR (Prostate stem cell antigen), anti-GPC3 (glypican 3 antigen) CAR, anti-CD20 CAR, anti-HER1 CAR (EGFR/HER-1 oncoantigen) or anti-CD47 CAR. These P-CARs may have a single-chain or a multi-chain architecture.

[0574] CD123 P-CAR

[0575] According to one embodiment, the P-CAR which is expressed in the engineered immune cell in combination with the N-CAR is a CD123 specific chimeric antigen receptor (CAR) having one of the polypeptide structure selected from V1 to V6, preferably V1, V3 and V5 as illustrated in FIG. 1, said structure comprising an extra cellular ligand binding-domain comprising VH and VL from a monoclonal anti-CD123 antibody, a hinge, a transmembrane domain and a cytoplasmic domain including a CD3 zeta signaling domain and a co-stimulatory domain from 4-1BB.

[0576] As a preferred variant, VH and VL from a monoclonal anti-CD123 antibody which can be used are derived from KIon-43 (respectively SEQ ID NO:47-48).

[0577] As possible options, the following respective short, medium or long hinges from FcγRIIIα, CD8a, IgG1 (SEQ ID NO:49, SEQ ID NO:50, SEQ ID NO:51) can be used.

[0578] As preferred transmembrane domain, 4-1BB or CD8a (SEQ ID NO:53, SEQ ID NO:52) can be preferred, and more preferably CD8a.

[0579] In a preferred embodiment, the P-CAR which is expressed in the engineered immune cell in combination with the N-CAR is CD123 specific chimeric antigen receptor having one of the polypeptide structure selected from V1, V3 and V5, as illustrated in FIG. 1, said structure comprising an extra cellular ligand binding-domain comprising VH and VL from a monoclonal anti-CD123 antibody, a hinge, a transmembrane domain, a cytoplasmic domain including a CD3 zeta signaling domain and a co-stimulatory domain from 4-1BB, said 123 CAR having at least 80% sequence identity with either SEQ ID NO. 53, SEQ ID NO. 58 or SEQ ID NO. 60.

[0580] CS1 P-CAR

[0581] According to another embodiment, the P-CAR which is expressed in the engineered immune cell in combination with the N-CAR is a CS1 specific chimeric antigen receptor (CAR) having one of the polypeptide structure selected from V1 to V6, preferably V1, V3 and V5 as illustrated in FIG. 1, said structure comprising an extra cellular ligand binding-domain comprising VH and VL from a monoclonal anti-CS1 antibody, a hinge, a transmembrane domain and a cytoplasmic domain including a CD3 zeta signaling domain and a co-stimulatory domain from 4-1BB.

[0582] Concerning the VH chain and the VL from a monoclonal anti-CS1 antibody, they can derived from the murine scFv Luc63, Luc90, Luc34, LucX1 and LucX2 antibodies (SEQ ID NO:38 to 47 in WO 2015121454 A1), and optionally humanized from these.

[0583] CD38 P-CAR

[0584] According to another embodiment, the P-CAR which is expressed in the engineered immune cell in combination with the N-CAR is a CD38 specific chimeric antigen receptor (CAR) having one of the polypeptide structure selected from V1 to V6, preferably V1, V3 and V5 as illustrated in FIG. 1, said structure comprising an extra cellular ligand binding-domain comprising VH and VL from a monoclonal anti-CD38 antibody, a hinge, a transmembrane domain and a cytoplasmic domain including a CD3 zeta signaling domain and a co-stimulatory domain from 4-166.

[0585] Preferably, the anti-CD38 CAR as P-CAR comprises a polypeptide sequence displaying at least 90%, at least 95%, at least 98% or at least 99% identity with a sequence selected from the group consisting of SEQ ID NO. 64-66 (based on 25A10 mAb), SEQ ID NO. 67-69 (based on 28F5 mAb), SEQ ID NO. 70-72 (based 1665).

[0586] For these CD38 scCAR and CS1 scCAR, the choice of preferred hinge or transmembrane domains remains the same than for the CD123 CAR.

[0587] Although, cells expressing CD38, as well as many other tumor antigen markers CS1 could be regarded as attractive targets for CARs, the fact that such antigen markers are also expressed at the surface of most T-cells, has hampered significantly the selection of these markers to perform immunotherapy. Thus, according to a preferred embodiment, the anti-CD38 positive CAR or the anti-CS1 positive CAR is expressed in combination with a N-CAR in immune cells which are further engineered to inactivate such CD38 or CS1 expressed on the surface of said immune cell. This method is described in WO2015/121454. This gene inactivation may be performed by the use of specific endonuclease such as a TALE-nuclease.

[0588] CLL-1 P-CAR

[0589] According to another embodiment, the P-CAR according to the invention which is expressed in the engineered immune cell in combination with the N-CAR is a CLL-1 specific chimeric antigen receptor (CAR) having one of the polypeptide structure selected from V1 to V6, preferably V1, V3 and V5 as illustrated in FIG. 1, said structure comprising an extra cellular ligand binding-domain comprising VH and VL from a monoclonal anti-CLL-1 antibody, a hinge, a transmembrane domain and a cytoplasmic domain including a CD3 zeta signaling domain and a co-stimulatory domain from 4-1BB.

[0590] Said V_{L} and V_{H} from a monoclonal anti-CLL-1 antibody are preferably selected from the antibodies referred to in the literature as SCO02-357, SCO2-378 and SCO2-161 in WO2005/00894 (Applicant: Crucell Holland BV); M26, M31, G4, M22, M29, M2, M5, G12 in WO2013/169625 (Applicant: Cellerant Therapeutics); and 21.26, 1075.7 in WO2009/051974 (Applicant: Nuvelo Inc).

[0591] The choice of preferred hinge or transmembrane domains remains the same than for the previous scCARs.

[0592] CD22 P-CAR

[0593] According to another embodiment, the P-CAR which is expressed in the engineered immune cell in combination with the N-CAR is a CD22 specific chimeric antigen receptor (CAR) having one of the polypeptide structure selected from V1 to V6, preferably V1, V3 and V5 as illustrated in FIG. 1, said structure comprising an extra cellular ligand binding-domain comprising VH and VL from a monoclonal anti-CD22 antibody, a hinge, a transmembrane domain and a cytoplasmic domain including a CD3 zeta signaling domain and a co-stimulatory domain from 4-1BB.

[0594] P-CAR Level of Inactivation

[0595] In some embodiments, the immune cell of the invention is activated when the P-CAR antigen binding domain binds to its antigen. In some embodiments, such activation is reduced when the N-CAR antigen binding domain binds to its antigen.

[0596] In some embodiments such reduction of activation is increased, preferably by at least 5%, 10%, 15%, 20% or 30% in an immune cell comprising an N-CAR according to the invention as compared to the same immune cell comprising an N-CAR comprising the full intracellular domain of PD-1.

[0597] In some embodiments such reduction of activation is increased, preferably by at least 5%, 10%, 15%, 20% or 30% in an immune cell comprising an N-CAR according to the invention as compared to the same immune cell comprising an N-CAR comprising the full intracellular domain of CTLA-4.

[0598] In some embodiments, the activation due to P-CAR binding to its antigen is reduced by at least 5%, 10%, 15%, 20%, 25%, 30%, 35%, 40%, 45%, 50%, 55%, 60%, 65%, 70%, 75%, 80%, 85% when the N-CAR and P-CAR antigen binding domains, both, bind to their respective antigens as compared to when the P-CAR antigen binding domain, alone, binds to its antigen.

[0599] In some embodiments, the level of activation of the immune cell is measured by determining cytokine production.

[0600] In some embodiments, the level of activation of the immune cell is measured by monitoring IFNgamma production by ELISA and/or FACS and/or luminex assay.

[0601] In some embodiments, the level of activation of the immune cell is measured by monitoring TNFalpha production by ELISA and/or luminex assay.

[0602] In some embodiments, the level of activation of the immune cell is measured by monitoring degranulation, for example by measuring CD107a levels by FACS.

[0603] In some embodiments, the level of activation of the immune cell is measured by monitoring the ability of the immune cell to kill target cells.

[0604] In some embodiments, the negative signal of the N-CAR is short-termed and reversible to ensure that the immune cells comprising a P-CAR and an N-CAR according to the invention may be activated when it encounters only P-CAR antigen, despite prior inactivation in a off-tissue setting that has both P-CAR and N-CAR antigens.

[0605] mAb-Specific Epitope/Mimotope

[0606] According to another embodiment, the present invention relates to improved inhibitory chimeric antigen receptors (iCAR), wherein the extracellular binding domain (scFv) has been modified by insertion of at least one mAb-specific epitope.

[0607] Such insertion is designed to allow both sorting and/or depletion of the immune cells endowed with said N-CARs.

[0608] According to another embodiment, the immune cell has been further engineered to express a P-CAR in which of such at least one mAb-specific epitope is inserted.

[0609] Preferably, two mAb-specific epitopes are inserted.

[0610] Such epitope(s) is(are) inserted anywhere in the extracellular part of N-CAR or P-CAR, either in the N terminal part, between the VH and VL chains of the scFvs or between the hinge or linker and the scFvs. Preferably, when more than one mAb-specific epitope are used, they are not in tandem (side by side).

[0611] In a preferred embodiment, the epitope introduced within the chimeric scFv is the CD20 antigen and the infused mAb which is being used to target it for sorting and/or depletion purpose(s) is rixutimab. Such epitope target sequence has over 80% identity, preferably over 90%, and more preferably over 95% identity, more preferably 100% identity with the CD20 antigen of SEQ ID NO. 82. Such preferred suicide gene system employs a recombinant antigenic polypeptide comprising antigenic motif recognized by the anti-CD20 mAb Rituximab, especially QBen10, such as in the so-called RQR8 polypeptide described in WO2013153391. Rituximab, an authorized antibody drug, can then be used for cell depletion when needed.

[0612] According to another embodiment, the epitope is a mimotope. As a macromolecule, often a peptide, which mimics the structure of an epitope, the mimotope has the advantage to be smaller than conventional epitope, and therefore may be beneficial for a non-conformational sequence and easier to reproduce in a long polypeptide such a CAR. Mimotopes are known for several pharmaceutically-approved mAb such as two 10 amino acid peptides for cetuximab (Riemer et al., 2005), or a 24 aa for palivizumab (Arbiza et al, 1992). As these mimotopes can be identified by phage display, it is possible to try several of them in order to obtain a sequence which does not perturb the scFv for the same mAb. Furthermore, their use can enhance a complement-dependent cytotoxicity (CDC).

[0613] As exemples, mimotopes of CD20 is SEQ ID NO:73 (CPYSNPSLC), mimotopes corresponding to the use of cetuximab of SEQ ID NO: 74 (CQFDLSTRRLKC) SEQ ID NO: 75 (CQYNLSSRALKC) SEQ ID NO: 76 (CVWQRWQKSYVC), SEQ ID NO: 77 (CMWDRFSRWYKC); mimotopes corresponding to the use of palivizumab of SEQ ID NO: 78 (NSELLSLINDMPITNDQKKLMSNN) or mimotopes corresponding to the use of nivolumab of SEQ ID NO: 79 (SFVLNWYRMSPSNQTDKLAAFPEDR), SEQ ID NO: 80 (SGTYLCGAISLAPKAQIKE).

[0614] The present invention relates also to the immune cells expressing said N-CARs, to the methods of in vivo depleting and/or in vitro sorting said CAR-expressing immune cells, and is drawn to their therapeutic use.

[0615] Isolated Immune Cell

[0616] Cell according to the present invention refers to a cell of hematopoietic origin functionally involved in the initiation and/or execution of innate and/or adaptative immune response. Cell according to the present invention is preferably a T-cell obtained from a donor. Said T cell according to the present invention can be derived from a stem cell. The stem cells can be adult stem cells, embryonic stem cells, more particularly non-human stem cells, cord blood stem cells, progenitor cells, bone marrow stem cells, totipotent stem cells or hematopoietic stem cells. In a preferred embodiment, cells are human cells, in particular human stem cells.

[0617] Representative human stem cells are CD34+ cells. Said isolated cell can also be a dendritic cell, killer dendritic cell, a mast cell, a NK-cell, a B-cell or a T-cell selected from the group consisting of inflammatory T-lymphocytes, cytotoxic T-lymphocytes, regulatory T-lymphocytes or helper T-lymphocytes. In another embodiment, said cell can be derived from the group consisting of CD4+ T-lymphocytes and CD8+ T-lymphocytes. Prior to expansion and genetic modification of the cells of the invention, a source of cells can be obtained from a subject through a variety of non-limiting methods. Cells can be obtained from a number of non-limiting sources, including peripheral blood mononuclear cells, bone marrow, lymph node tissue, cord blood, thymus tissue, tissue from a site of infection, ascites, pleural effusion, spleen tissue, and tumors. In certain embodiments of the present invention, any number of T-cell lines available and known to those skilled in the art, may be used. In another embodiment, said cell is preferably derived from a healthy donor. In another embodiment, said cell is part of a mixed population of cells which present different phenotypic characteristics.

[0618] Preferably, isolation and preparation of stem cells does not require the destruction of at least one human embryo. The immune cells can originate from the patient, in view of operating autologous treatments, or from donors in view of producing allogeneic cells, which can be used in allogeneic treatments.

[0619] The present invention relates also to an isolated immune cell comprising a P-CAR and an N-CAR such as presented above.

[0620] Said P-CAR may be a single chain CAR or a multi-chain P-CAR as defined in WO2014/039523.

[0621] According to an embodiment, the isolated immune cell includes at least a N-CAR which comprises at least:
[0622] an extracellular binding domain, which is able to bind to an “off-target” antigen on a healthy cell and;
[0623] an inhibitory transmembrane polypeptide having a sequence with more than 80%, preferably 90% and more preferably 95%, and even more preferably 100% identity with a sequence from SEQ ID NO: 1 (human KI2L2), SEQ ID NO: 2 (human KI2L1), SEQ ID NO:3 (human FCG2B), SEQ ID NO:4 (human KI2L3), SEQ ID NO: 5 (human KI3L2), SEQ ID NO:6 (human KI2L4), SEQ ID NO:7 (human KI3L1), SEQ ID NO:8 (human KI2LA), SEQ ID NO:9 (human MILR1), SEQ ID NO:10 (human LIRB4), SEQ ID NO:11 (human LIRB3), SEQ ID NO:12 (human KI3L3), SEQ ID NO:15 (human LIRB5), SEQ ID NO:16 (human LIRB2), SEQ ID NO:18 (human FCRL4), SEQ ID NO:23 (human FCRL5), SEQ ID NO:24 (human FCRL2), SEQ ID NO: 25 (human FCRL1), SEQ ID NO:27 (human FCRL3), SEQ ID NO:28 (human MPZL1), SEQ ID NO:29 (human PILRA) or SEQ ID NO:30 (human PVR);

[0624] and a P-CAR which comprises in the engineered immune cell in combination with the N-CAR; said P-CAR comprising one transmembrane polypeptide comprising at least one extracellular ligand-binding domain able to bind to CD123 antigen, and one signal-transducing domain, optionally with a co-stimulatory domain.

[0625] According to another preferred embodiment, the isolated immune cell includes at least a N-CAR which comprises at least:
[0626] an extracellular binding domain, which is able to bind to an “off-target” antigen on a healthy cell;
[0627] an inhibitory transmembrane polypeptide having a sequence selected from the group consisting of SEQ ID NO: 1 (human KI2L2), SEQ ID NO: 2 (human KI2L1), SEQ ID NO:3 (human FCG2B), SEQ ID NO:4 (human KI2L3), SEQ ID NO: 5 (human KI3L2), SEQ ID NO:6 (human KI2L4), SEQ ID NO:7 (human KI3L1), SEQ ID NO:8 (human KI2LA), SEQ ID NO:9 (human MILR1), SEQ ID NO:10 (human LIRB4), SEQ ID NO:11 (human LIRB3), SEQ ID NO:12 (human KI3L3), SEQ ID NO:15 (human LIRB5), SEQ ID NO:16 (human LIRB2), SEQ ID NO:18 (human FCRL4), SEQ ID NO:23 (human FCRL5), SEQ ID NO:24 (human FCRL2), SEQ ID NO: 25 (human FCRL1), SEQ ID NO:27 (human FCRL3), SEQ ID NO:28 (human MPZL1), SEQ ID NO:29 (human PILRA) or SEQ ID NO:30 (human PVR);

[0628] and a P-CAR which comprises in the engineered immune cell in combination with the N-CAR; said P-CAR comprising:

[0629] one transmembrane polypeptide comprising at least one extracellular ligand-binding domain able to bind to CD123 antigen, and one signal-transducing domain, optionally with a co-stimulatory domain.

[0630] According to an embodiment, the isolated immune cell includes at least a N-CAR which comprises at least:
[0631] an extracellular binding domain, comprising a polypeptide sequence sharing more than 80%, preferably 90% and more preferably 95% and even more preferably 100% identity with SEQ ID NO: 81 (CD4 antigen), SEQ ID NO: 82 (CD20 antigen), SEQ ID NO: 83 (CD22 antigen), SEQ ID NO: 84 (CD25 antigen) or SEQ ID NO: 85 (MUC1 antigen);
[0632] an inhibitory transmembrane polypeptide having a sequence with more than 80%, preferably 90% and more preferably 95% identity and even more preferably 100% with SEQ ID NO: 1 (human KI2L2), SEQ ID NO: 2 (human KI2L1), SEQ ID NO:3 (human FCG2B), SEQ ID NO:4 (human KI2L3), SEQ ID NO: 5 (human KI3L2), SEQ ID NO:6 (human KI2L4), SEQ ID NO:7 (human KI3L1), SEQ ID NO:8 (human KI2LA), SEQ ID NO:9 (human MILR1), SEQ ID NO:10 (human LIRB4), SEQ ID NO:11 (human LIRB3), SEQ ID NO:12 (human KI3L3), SEQ ID NO:15 (human LIRB5), SEQ ID NO:16 (human LIRB2), SEQ ID NO:18 (human FCRL4), SEQ ID NO:23 (human FCRL5), SEQ ID NO:24 (human FCRL2), SEQ ID NO: 25 (human FCRL1), SEQ ID NO:27 (human FCRL3), SEQ ID NO:28 (human MPZL1), SEQ ID NO:29 (human PILRA) or SEQ ID NO:30 (human PVR);

[0633] and a P-CAR which comprises in the engineered immune cell in combination with the N-CAR; said P-CAR comprising one transmembrane polypeptide comprising at least one extracellular ligand-binding domain able to bind to CD123 antigen, and one signal-transducing domain, optionally with a co-stimulatory domain.

[0634] According to another preferred embodiment, the isolated immune cell includes at least a N-CAR which comprises at least:
[0635] an extracellular binding domain, comprising a polypeptide sequence sharing more than 80%, preferably 90% and more preferably 95% identity and even more preferably 100% with SEQ ID NO: 81 (CD4 antigen), SEQ ID NO: 82 (CD20 antigen), SEQ ID NO: 83 (CD22 antigen), SEQ ID NO: 84 (CD25 antigen) or SEQ ID NO: 85 (MUC1 antigen);
[0636] an inhibitory transmembrane polypeptide having a sequence of SEQ ID NO: 1 (human KI2L2), SEQ ID NO: 2 (human KI2L1), SEQ ID NO:3 (human FCG2B), SEQ ID NO:4 (human KI2L3), SEQ ID NO: 5 (human KI3L2), SEQ ID NO:6 (human KI2L4), SEQ ID NO:7 (human KI3L1), SEQ ID NO:8 (human KI2LA), SEQ ID NO:9 (human MILR1), SEQ ID NO:10 (human LIRB4), SEQ ID NO:11 (human LIRB3), SEQ ID NO:12 (human KI3L3), SEQ ID NO:15 (human LIRB5), SEQ ID NO:16 (human LIRB2), SEQ ID NO:18 (human FCRL4), SEQ ID NO:23 (human FCRL5), SEQ ID NO:24 (human FCRL2), SEQ ID NO: 25 (human FCRL1), SEQ ID NO:27 (human FCRL3), SEQ ID NO:28 (human MPZL1), SEQ ID NO:29 (human PILRA) or SEQ ID NO:30 (human PVR);

[0637] and a P-CAR which comprises in the engineered immune cell in combination with the N-CAR; said P-CAR comprising one transmembrane polypeptide comprising at least one extracellular ligand-binding domain able to bind to CD123 antigen, and one signal-transducing domain, optionally with a co-stimulatory domain.

[0638] According to a preferred embodiment, the isolated immune cell includes at least a N-CAR which comprises at least:
[0639] an extracellular binding domain, which is able to bind to an “off-target” antigen on a healthy cell, and
[0640] an inhibitory transmembrane polypeptide having a polypeptide sequence selected from the group consisting of SEQ ID NO: 33 (human TR10D), SEQ ID NO: 34 (human TR10A) and SEQ ID NO: 35 (human TR10B);

[0641] and a P-CAR which comprises in the engineered immune cell in combination with the N-CAR; said P-CAR comprising:
[0642] one transmembrane polypeptide comprising at least one extracellular ligand-binding domain able to bind to CD123 antigen, and one signal-transducing domain, optionally with a co-stimulatory domain.

[0643] According to another preferred embodiment, the isolated immune cell includes at least a N-CAR which comprises at least:
[0644] an extracellular binding domain, which is able to bind to an “off-target” antigen on a healthy cell and;
[0645] an inhibitory transmembrane polypeptide having a sequence of SEQ ID NO: 1 (human KI2L2), SEQ ID NO: 2 (human KI2L1), SEQ ID NO:3 (human FCG2B), SEQ ID NO:4 (human KI2L3), SEQ ID NO: 5 (human KI3L2), SEQ ID NO:6 (human KI2L4), SEQ ID NO:7 (human KI3L1), SEQ ID NO:8 (human KI2LA), SEQ ID NO:9 (human MILR1), SEQ ID NO:10 (human LIRB4), SEQ ID NO:11 (human LIRB3), SEQ ID NO:12 (human KI3L3), SEQ ID NO:15 (human LIRB5), SEQ ID NO:16 (human LIRB2), SEQ ID NO:18 (human FCRL4), SEQ ID NO:23 (human FCRL5), SEQ ID NO:24 (human FCRL2), SEQ ID NO: 25 (human FCRL1), SEQ ID NO:27 (human FCRL3), SEQ ID NO:28 (human MPZL1), SEQ ID NO:29 (human PILRA) or SEQ ID NO:30 (human PVR);

[0646] and a P-CAR which comprises in the engineered immune cell in combination with the N-CAR; said P-CAR comprising one transmembrane polypeptide comprising at least one extracellular ligand-binding domain able to bind to CD123 antigen, and one signal-transducing domain, optionally with a co-stimulatory domain.

[0647] According to a preferred embodiment, the isolated immune cell includes at least a N-CAR which comprises at least:

[0648] an extracellular binding domain, comprising a polypeptide sequence sharing more than 80%, preferably 90% and more preferably 95% identity and even more preferably 100% with SEQ ID NO: 81 (CD4 antigen), SEQ ID NO: 82 (CD20 antigen), SEQ ID NO: 83 (CD22 antigen), SEQ ID NO: 84 (CD25 antigen) or SEQ ID NO: 85 (MUC1 antigen);

[0649] and;
[0650] an inhibitory transmembrane polypeptide having a sequence with more than 80%, preferably 90% and more preferably 95% identity and even more preferably 100% identity with SEQ ID NO: 1 (human KI2L2), SEQ ID NO: 2 (human KI2L1), SEQ ID NO:3 (human FCG2B), SEQ ID NO:4 (human KI2L3), SEQ ID NO: 5 (human KI3L2), SEQ ID NO:6 (human KI2L4), SEQ ID NO:7 (human KI3L1), SEQ ID NO:8 (human KI2LA), SEQ ID NO:9 (human MILR1), SEQ ID NO:10 (human LIRB4), SEQ ID NO:11 (human LIRB3), SEQ ID NO:12 (human KI3L3), SEQ ID NO:15 (human LIRB5), SEQ ID NO:16 (human LIRB2), SEQ ID NO:18 (human FCRL4), SEQ ID NO:23 (human FCRL5), SEQ ID NO:24 (human FCRL2), SEQ ID NO: 25 (human FCRL1), SEQ ID NO:27 (human FCRL3), SEQ ID NO:28 (human MPZL1), SEQ ID NO:29 (human PILRA) or SEQ ID NO:30 (human PVR);
[0651] and a CD123 specific chimeric antigen receptor (CAR) (as P-CAR) which comprises in the engineered immune cell in combination with the N-CAR; said CD123 specific chimeric antigen receptor (CAR) having one of the polypeptide structure selected from V1 to V6, preferably V1, V3 and V5 as illustrated in FIG. 1, said structure comprising an extra cellular ligand binding-domain comprising VH and VL from a monoclonal anti-CD123 antibody, a hinge, a transmembrane domain and a cytoplasmic domain including a CD3 zeta signaling domain and a co-stimulatory domain from 4-1BB.

[0652] According to a preferred embodiment, the isolated immune cell includes at least a N-CAR which comprises at least:
[0653] an extracellular binding domain, comprising a polypeptide sequence sharing more than 80%, preferably 90% and more preferably 95% identity and even more preferably 100% with SEQ ID NO: 81 (CD4 antigen), SEQ ID NO: 82 (CD20 antigen), SEQ ID NO: 83 (CD22 antigen), SEQ ID NO: 84 (CD25 antigen) or SEQ ID NO: 85 (MUC1 antigen);
[0654] an inhibitory transmembrane polypeptide having a polypeptide sequence of more than 80%, preferably 90% and more preferably 95% identity with SEQ ID NO: 33 (human TR10D), SEQ ID NO: 34 (human TR10A) and SEQ ID NO: 35 (human TR10B);

[0655] and a P-CAR which comprises in the engineered immune cell in combination with the N-CAR; said P-CAR comprising one transmembrane polypeptide comprising at least one extracellular ligand-binding domain able to bind to CD123 antigen, and one signal-transducing domain, optionally with a co-stimulatory domain.

[0656] According to a preferred embodiment, the isolated immune cell includes at least a N-CAR which comprises at least:
[0657] an extracellular binding domain, comprising a polypeptide sequence sharing more than 80%, preferably 90% and more preferably 95% identity and even more preferably 100% with SEQ ID NO: 81 (CD4 antigen), SEQ ID NO: 82 (CD20 antigen), SEQ ID NO: 83 (CD22 antigen), SEQ ID NO: 84 (CD25 antigen) or SEQ ID NO: 85 (MUC1 antigen);
[0658] an inhibitory transmembrane polypeptide having a polypeptide sequence of SEQ ID NO: 33 (human TR10D), SEQ ID NO: 34 (human TR10A) and SEQ ID NO: 35 (human TR10B).

[0659] and a P-CAR which comprises in the engineered immune cell in combination with the N-CAR; said P-CAR comprising one transmembrane polypeptide comprising at least one extracellular ligand-binding domain able to bind to CD123 antigen, and one signal-transducing domain, optionally with a co-stimulatory domain.

[0660] According to a more preferred embodiment, the isolated immune cell includes at least a N-CAR which comprises at least:
[0661] an extracellular binding domain, comprising a polypeptide sequence sharing more than 80%, preferably 90% and more preferably 95% identity and even more preferably 100% with SEQ ID NO: 81 (CD4 antigen), SEQ ID NO: 82 (CD20 antigen), SEQ ID NO: 83 (CD22 antigen), SEQ ID NO: 84 (CD25 antigen) or SEQ ID NO: 85 (MUC1 antigen);

[0662] and;
[0663] an inhibitory transmembrane polypeptide having a polypeptide sequence of more than 80%, preferably 90% and more preferably 95% identity and even more preferably 100% identity with SEQ ID NO: 33 (human TR10D), SEQ ID NO: 34 (human TR10A) and SEQ ID NO: 35 (human TR10B);
[0664] and a CD123 specific chimeric antigen receptor (CAR) (as P-CAR) which comprises in the engineered immune cell in combination with the N-CAR; said CD123 specific chimeric antigen receptor (CAR) having one of the polypeptide structure selected from V1 to V6, preferably V1, V3 and V5 as illustrated in FIG. 1, said structure comprising an extra cellular ligand binding-domain comprising VH and VL from a monoclonal anti-CD123 antibody, a hinge, a transmembrane domain and a cytoplasmic domain including a CD3 zeta signaling domain and a co-stimulatory domain from 4-1BB.

[0665] Preferably, the above anti-CD123 CARs (P-CARs) having one of the polypeptide structure selected from V1, V3 and V5, as illustrated in FIG. 1, said structure comprising an extra cellular ligand binding-domain comprising VH and VL from a monoclonal anti-CD123 antibody, a hinge, a transmembrane domain, a cytoplasmic domain including a CD3 zeta signaling domain and a co-stimulatory domain from 4-1BB, said 123 CAR having at least 80% sequence identity with either SEQ ID NO. 56, SEQ ID NO. 58 or SEQ ID NO. 60.

[0666] According to an embodiment, the isolated immune cell includes at least a N-CAR which comprises at least:
[0667] an extracellular binding domain, comprising a polypeptide sequence sharing more than 80%, preferably 90% and more preferably 95% identity and even more preferably 100% identity with SEQ ID NO: 86 (CD56 antigen), SEQ ID NO: 87 (CD205 antigen), SEQ ID NO: 88 (CD83 antigen), SEQ ID NO: 89 (CD206 antigen), SEQ ID NO: 90 (CD200 antigen), or SEQ ID NO: 91 (CD36 antigen);

[0668] and;
[0669] an inhibitory transmembrane polypeptide having a sequence with more than 80%, preferably 90% and more preferably 95% identity and even more preferably 100% identity with SEQ ID NO: 1 (human KI2L2), SEQ ID NO: 2 (human KI2L1), SEQ ID NO:3 (human FCG2B), SEQ ID NO:4 (human KI2L3), SEQ ID NO: 5 (human KI3L2), SEQ ID NO:6 (human KI2L4), SEQ ID NO:7 (human KI3L1), SEQ ID NO:8 (human KI2LA), SEQ ID NO:9 (human MILR1), SEQ ID NO:10 (human LIRB4), SEQ ID NO:11 (human LIRB3), SEQ ID NO:12 (human KI3L3), SEQ ID NO:15 (human LIRB5), SEQ ID NO:16 (human LIRB2), SEQ ID NO:18 (human FCRL4), SEQ ID NO:23 (human FCRL5), SEQ ID NO:24 (human FCRL2), SEQ ID NO: 25 (human FCRL1), SEQ ID NO:27 (human FCRL3), SEQ ID NO:28 (human MPZL1), SEQ ID NO:29 (human PILRA) or SEQ ID NO:30 (human PVR);
[0670] and a CD123 specific chimeric antigen receptor (CAR) (as P-CAR) which comprises in the engineered immune cell in combination with the N-CAR; said CD123 specific chimeric antigen receptor (CAR) having one of the polypeptide structure selected from V1 to V6, preferably V1, V3 and V5 as illustrated in FIG. 1, said structure comprising an extra cellular ligand binding-domain comprising VH and VL from a monoclonal anti-CD123 antibody, a hinge, a transmembrane domain and a cytoplasmic domain including a CD3 zeta signaling domain and a co-stimulatory domain from 4-1BB.

[0671] According to an embodiment, the isolated immune cell includes at least a N-CAR which comprises at least:
[0672] an extracellular binding domain, which is able to bind to an “off-target” antigen on a healthy cell;

[0673] and;
[0674] an inhibitory transmembrane polypeptide having a sequence with more than 80%, preferably 90% and more preferably 95% identity and even more preferably 100% identity with SEQ ID NO: 1 (human KI2L2), SEQ ID NO: 2 (human KI2L1), SEQ ID NO:3 (human FCG2B), SEQ ID NO:4 (human KI2L3), SEQ ID NO: 5 (human KI3L2), SEQ ID NO:6 (human KI2L4), SEQ ID NO:7 (human KI3L1), SEQ ID NO:8 (human KI2LA), SEQ ID NO:9 (human MILR1), SEQ ID NO:10 (human LIRB4), SEQ ID NO:11 (human LIRB3), SEQ ID NO:12 (human KI3L3), SEQ ID NO:15 (human LIRB5), SEQ ID NO:16 (human LIRB2), SEQ ID NO:18 (human FCRL4), SEQ ID NO:23 (human FCRL5), SEQ ID NO:24 (human FCRL2), SEQ ID NO: 25 (human FCRL1), SEQ ID NO:27 (human FCRL3), SEQ ID NO:28 (human MPZL1), SEQ ID NO:29 (human PILRA) or SEQ ID NO:30 (human PVR);

[0675] and a CD38 specific chimeric antigen receptor (CAR) (as P-CAR) which comprises in the engineered immune cell in combination with the N-CAR; said CD38 specific chimeric antigen receptor (CAR) containing at least one transmembrane polypeptide which includes at least one extra-binding domain recognizing specifically the CD38 antigen, and an intracellular signaling domain, optionally with co-stimulatory domain.

[0676] According to an embodiment, the isolated immune cell includes at least a N-CAR which comprises at least:

[0677] an extracellular binding domain, which is able to bind to an “off-target” antigen on a healthy cell;

[0678] and;
[0679] an inhibitory transmembrane polypeptide of SEQ ID NO: 1 (human KI2L2), SEQ ID NO: 2 (human KI2L1), SEQ ID NO:3 (human FCG2B), SEQ ID NO:4 (human KI2L3), SEQ ID NO: 5 (human KI3L2), SEQ ID NO:6 (human KI2L4), SEQ ID NO:7 (human KI3L1), SEQ ID NO:8 (human KI2LA), SEQ ID NO:9 (human MILR1), SEQ ID NO:10 (human LIRB4), SEQ ID NO:11 (human LIRB3), SEQ ID NO:12 (human KI3L3), SEQ ID NO:15 (human LIRB5), SEQ ID NO:16 (human LIRB2), SEQ ID NO:18 (human FCRL4), SEQ ID NO:23 (human FCRL5), SEQ ID NO:24 (human FCRL2), SEQ ID NO: 25 (human FCRL1), SEQ ID NO:27 (human FCRL3), SEQ ID NO:28 (human MPZL1), SEQ ID NO:29 (human PILRA) or SEQ ID NO:30 (human PVR);

[0680] and a CD38 specific chimeric antigen receptor (CAR) (as P-CAR) which comprises in the engineered immune cell in combination with the N-CAR; said CD38 specific chimeric antigen receptor (CAR) containing at least one transmembrane polypeptide which includes at least one extra-binding domain recognizing specifically the CD38 antigen, and an intracellular signaling domain, optionally with co-stimulatory domain.

[0681] According to a preferred embodiment, the isolated immune cell includes at least a N-CAR which comprises at least:

[0682] an extracellular binding domain, comprising a polypeptide sequence sharing more than 80%, preferably 90% and more preferably 95% identity and even more preferably 100% identity with SEQ ID NO: 86 (CD56 antigen), SEQ ID NO: 87 (CD205 antigen), SEQ ID NO: 88 (CD83 antigen), SEQ ID NO: 89 (CD206 antigen), SEQ ID NO: 90 (CD200 antigen), or SEQ ID NO: 91 (CD36 antigen); and;
[0683] an inhibitory transmembrane polypeptide having a sequence with more than 80%, preferably 90% and more preferably 95% identity and even more preferably 100% identity with SEQ ID NO: 1 (human KI2L2), SEQ ID NO: 2 (human KI2L1), SEQ ID NO:3 (human FCG2B), SEQ ID NO:4 (human KI2L3), SEQ ID NO: 5 (human KI3L2), SEQ ID NO:6 (human KI2L4), SEQ ID NO:7 (human KI3L1), SEQ ID NO:8 (human KI2LA), SEQ ID NO:9 (human MILR1), SEQ ID NO:10 (human LIRB4), SEQ ID NO:11 (human LIRB3), SEQ ID NO:12 (human KI3L3), SEQ ID NO:15 (human LIRB5), SEQ ID NO:16 (human LIRB2), SEQ ID NO:18 (human FCRL4), SEQ ID NO:23 (human FCRL5), SEQ ID NO:24 (human FCRL2), SEQ ID NO: 25 (human FCRL1), SEQ ID NO:27 (human FCRL3), SEQ ID NO:28 (human MPZL1), SEQ ID NO:29 (human PILRA) or SEQ ID NO:30 (human PVR);

[0684] and a CD38 specific chimeric antigen receptor (CAR) (as P-CAR) which comprises in the engineered immune cell in combination with the N-CAR; said CD38 specific chimeric antigen receptor (CAR) having one of the polypeptide structure selected from V1 to V6, preferably V1, V3 and V5 as illustrated in FIG. 1, said structure comprising an extra cellular ligand binding-domain comprising VH and VL from a monoclonal anti-CD38 antibody, a hinge, a transmembrane domain and a cytoplasmic domain including a CD3 zeta signaling domain and a co-stimulatory domain from 4-1BB.

[0685] According to a preferred embodiment, the isolated immune cell includes at least a N-CAR which comprises at least:
[0686] an extracellular binding domain, comprising a polypeptide sequence sharing more than 80%, preferably 90% and more preferably 95% identity and even more preferably 100% identity with SEQ ID NO: 86 (CD56 antigen), SEQ ID NO: 87 (CD205 antigen), SEQ ID NO: 88 (CD83 antigen), SEQ ID NO: 89 (CD206 antigen), SEQ ID NO: 90 (CD200 antigen), or SEQ ID NO: 91 (CD36 antigen);

[0687] and;
[0688] an inhibitory transmembrane polypeptide having a sequence of SEQ ID NO: 1 (human KI2L2), SEQ ID NO: 2 (human KI2L1), SEQ ID NO:3 (human FCG2B), SEQ ID NO:4 (human KI2L3), SEQ ID NO: 5 (human KI3L2), SEQ ID NO:6 (human KI2L4), SEQ ID NO:7 (human KI3L1), SEQ ID NO:8 (human KI2LA), SEQ ID NO:9 (human MILR1), SEQ ID NO:10 (human LIRB4), SEQ ID NO:11 (human LIRB3), SEQ ID NO:12 (human KI3L3), SEQ ID NO:15 (human LIRB5), SEQ ID NO:16 (human LIRB2), SEQ ID NO:18 (human FCRL4), SEQ ID NO:23 (human FCRL5), SEQ ID NO:24 (human FCRL2), SEQ ID NO: 25 (human FCRL1), SEQ ID NO:27 (human FCRL3), SEQ ID NO:28 (human MPZL1), SEQ ID NO:29 (human PILRA) or SEQ ID NO:30 (human PVR);

[0689] and a CD38 specific chimeric antigen receptor (CAR) (as P-CAR) which comprises in the engineered immune cell in combination with the N-CAR; said CD38 specific chimeric antigen receptor (CAR) having one of the polypeptide structure selected from V1 to V6, preferably V1, V3 and V5 as illustrated in FIG. 1, said structure comprising an extra cellular ligand binding-domain comprising VH and VL from a monoclonal anti-CD38 antibody, a hinge, a transmembrane domain and a cytoplasmic domain including a CD3 zeta signaling domain and a co-stimulatory domain from 4-1BB.

[0690] According to a preferred embodiment, the isolated immune cell includes at least a N-CAR which comprises at least:
[0691] an extracellular binding domain, comprising a polypeptide sequence sharing more than 80%, preferably 90% and more preferably 95% identity and even more preferably 100% identity with SEQ ID NO: 86 (CD56 antigen), SEQ ID NO: 87 (CD205 antigen), SEQ ID NO: 88 (CD83 antigen), SEQ ID NO: 89 (CD206 antigen), SEQ ID NO: 90 (CD200 antigen), or SEQ ID NO: 91 (CD36 antigen);

[0692] and;
[0693] an inhibitory transmembrane polypeptide having a polypeptide sequence of more than 80%, preferably 90% and more preferably 95% identity and even more preferably 100% identity with SEQ ID NO: 33 (human TR10D), SEQ ID NO: 34 (human TR10A) and SEQ ID NO: 35 (human TR10B);

[0694] and a CD38 specific chimeric antigen receptor (CAR) (as P-CAR) which comprises in the engineered immune cell in combination with the N-CAR; said CD38 specific chimeric antigen receptor (CAR) having one of the polypeptide structure selected from V1 to V6, preferably V1, V3 and V5 as illustrated in FIG. 1, said structure comprising an extra cellular ligand binding-domain comprising VH and VL from a monoclonal anti-CD38 antibody, a hinge, a transmembrane domain and a cytoplasmic domain including a CD3 zeta signaling domain and a co-stimulatory domain from 4-1BB.

[0695] Preferably, the anti-CD38 CAR as P-CAR comprises a polypeptide sequence displaying at least 90%, at least 95%, at least 98% or at least 99% identity to one selected from SEQ ID NO. 64-66 (based on 25A10 mAb), SEQ ID NO. 67-69 (based on 28F5 mAb) or SEQ ID NO. 70-72 (based on 16B5 mAb).

[0696] According to a more preferred embodiment, the anti-CD38 specific chimeric antigen receptor (anti-CD38 CAR) of the invention comprises a polypeptide sequence displaying at least 90%, at least 95%, at least 98% or at least 99% identity to one selected from SEQ ID NO. 64-66 (based on 25A10 mAb) or SEQ ID NO. 67-69 (based on 28F5 mAb).

[0697] According to an embodiment, the isolated immune cell includes at least a N-CAR which comprises at least:
[0698] an extracellular binding domain, which is able to bind to an “off-target” antigen on a healthy cell;

[0699] and;
[0700] an inhibitory transmembrane polypeptide having a sequence with more than 80%, preferably 90% and more preferably 95% identity and even more preferably 100% identity with SEQ ID NO: 1 (human KI2L2), SEQ ID NO: 2 (human KI2L1), SEQ ID NO:3 (human FCG2B), SEQ ID NO:4 (human KI2L3), SEQ ID NO: 5 (human KI3L2), SEQ ID NO:6 (human KI2L4), SEQ ID NO:7 (human KI3L1), SEQ ID NO:8 (human KI2LA), SEQ ID NO:9 (human MILR1), SEQ ID NO:10 (human LIRB4), SEQ ID NO:11 (human LIRB3), SEQ ID NO:12 (human KI3L3), SEQ ID NO:15 (human LIRB5), SEQ ID NO:16 (human LIRB2), SEQ ID NO:18 (human FCRL4), SEQ ID NO:23 (human FCRL5), SEQ ID NO:24 (human FCRL2), SEQ ID NO: 25 (human FCRL1), SEQ ID NO:27 (human FCRL3), SEQ ID NO:28 (human MPZL1), SEQ ID NO:29 (human PILRA) or SEQ ID NO:30 (human PVR);
[0701] and a CS1 specific chimeric antigen receptor (CAR) (as P-CAR) which comprises in the engineered immune cell in combination with the N-CAR; said CS1 specific chimeric antigen receptor (CAR) containing at least one transmembrane polypeptide which includes at least one extra-binding domain recognizing specifically the CS1 antigen, and an intracellular signaling domain, optionally with co-stimulatory domain.

[0702] According to an embodiment, the isolated immune cell includes at least a N-CAR which comprises at least:
[0703] an extracellular binding domain, which is able to bind to an “off-target” antigen on a healthy cell;

[0704] and;
[0705] an inhibitory transmembrane polypeptide of SEQ ID NO: 1 (human KI2L2), SEQ ID NO: 2 (human KI2L1), SEQ ID NO:3 (human FCG2B), SEQ ID NO:4 (human KI2L3), SEQ ID NO: 5 (human KI3L2), SEQ ID NO:6 (human KI2L4), SEQ ID NO:7 (human KI3L1), SEQ ID NO:8 (human KI2LA), SEQ ID NO:9 (human MILR1), SEQ ID NO:10 (human LIRB4), SEQ ID NO:11 (human LIRB3), SEQ ID NO:12 (human KI3L3), SEQ ID NO:15 (human LIRB5), SEQ ID NO:16 (human LIRB2), SEQ ID NO:18 (human FCRL4), SEQ ID NO:23 (human FCRL5), SEQ ID NO:24 (human FCRL2), SEQ ID NO: 25 (human FCRL1), SEQ ID NO:27 (human FCRL3), SEQ ID NO:28 (human MPZL1), SEQ ID NO:29 (human PILRA) or SEQ ID NO:30 (human PVR);

[0706] and a CS1 specific chimeric antigen receptor (CAR) (as P-CAR) which comprises in the engineered immune cell in combination with the N-CAR; said CS1 specific chimeric antigen receptor (CAR) containing at least one transmembrane polypeptide which includes at least one extra-binding domain recognizing specifically the CS1 antigen, and an intracellular signaling domain, optionally with co-stimulatory domain.

[0707] According to an embodiment, the isolated immune cell includes at least a N-CAR which comprises at least:
[0708] an extracellular binding domain, comprising a polypeptide sequence sharing more than 80%, preferably 90% and more preferably 95% and even more preferably 100% identity identity with SEQ ID NO: 92 (troponin C), SEQ ID NO: 93 (beta-1 integrin), SEQ ID NO: 94 (CCKBR antigen), SEQ ID NO: 95 (GALR1 antigen) or SEQ ID NO: 96 (CUBN antigen);
[0709] an inhibitory transmembrane polypeptide having a sequence with more than 80%, preferably 90% and more preferably 95% identity and even more preferably 100% identity with SEQ ID NO: 1 (human KI2L2), SEQ ID NO: 2 (human KI2L1), SEQ ID NO:3 (human FCG2B), SEQ ID NO:4 (human KI2L3), SEQ ID NO: 5 (human KI3L2), SEQ ID NO:6 (human KI2L4), SEQ ID NO:7 (human KI3L1), SEQ ID NO:8 (human KI2LA), SEQ ID NO:9 (human MILR1), SEQ ID NO:10 (human LIRB4), SEQ ID NO:11 (human LIRB3), SEQ ID NO:12 (human KI3L3), SEQ ID NO:15 (human LIRB5), SEQ ID NO:16 (human LIRB2), SEQ ID NO:18 (human FCRL4), SEQ ID NO:23 (human FCRL5), SEQ ID NO:24 (human FCRL2), SEQ ID NO: 25 (human FCRL1), SEQ ID NO:27 (human FCRL3), SEQ ID NO:28 (human MPZL1), SEQ ID NO:29 (human PILRA) or SEQ ID NO:30 (human PVR);

[0710] and a CS1 specific chimeric antigen receptor (CAR) (as P-CAR) which comprises in the engineered immune cell in combination with the N-CAR; said CS1 specific chimeric antigen receptor (CAR) having one of the polypeptide structure selected from V1 to V6, preferably V1, V3 and V5 as illustrated in FIG. 1, said structure comprising an extra cellular ligand binding-domain comprising VH and VL from a monoclonal anti-CS1 antibody, a hinge, a transmembrane domain and a cytoplasmic domain including a CD3 zeta signaling domain and a co-stimulatory domain from 4-1BB.

[0711] According to an embodiment, the isolated immune cell includes at least a N-CAR which comprises at least:
[0712] an extracellular binding domain, comprising a polypeptide sequence sharing more than 80%, preferably 90% and more preferably 95% and even more preferably 100% identity identity with SEQ ID NO: 92 (troponin C), SEQ ID NO: 93 (beta-1 integrin), SEQ ID NO: 94 (CCKBR antigen), SEQ ID NO: 95 (GALR1 antigen) or SEQ ID NO: 96 (CUBN antigen);
[0713] an inhibitory transmembrane polypeptide of SEQ ID NO: 1 (human KI2L2), SEQ ID NO: 2 (human KI2L1), SEQ ID NO:3 (human FCG2B), SEQ ID NO:4 (human KI2L3), SEQ ID NO: 5 (human KI3L2), SEQ ID NO:6 (human KI2L4), SEQ ID NO:7 (human KI3L1), SEQ ID NO:8 (human KI2LA), SEQ ID NO:9 (human MILR1), SEQ ID NO:10 (human LIRB4), SEQ ID NO:11 (human LIRB3), SEQ ID NO:12 (human KI3L3), SEQ ID NO:15 (human LIRB5), SEQ ID NO:16 (human LIRB2), SEQ ID NO:18 (human FCRL4), SEQ ID NO:23 (human FCRL5), SEQ ID NO:24 (human FCRL2), SEQ ID NO: 25 (human FCRL1), SEQ ID NO:27 (human FCRL3), SEQ ID NO:28 (human MPZL1), SEQ ID NO:29 (human PILRA) or SEQ ID NO:30 (human PVR);

[0714] and a CS1 specific chimeric antigen receptor (CAR) (as P-CAR) which comprises in the engineered immune cell in combination with the N-CAR; said CS1 specific chimeric antigen receptor (CAR) having one of the polypeptide structure selected from V1 to V6, preferably V1, V3 and V5 as illustrated in FIG. 1, said structure comprising an extra cellular ligand binding-domain comprising VH and VL from a monoclonal anti-CS1 antibody, a hinge, a transmembrane domain and a cytoplasmic domain including a CD3 zeta signaling domain and a co-stimulatory domain from 4-1BB.

[0715] According to an embodiment, the isolated immune cell includes at least a N-CAR which comprises at least:
[0716] an extracellular binding domain, which is able to bind to an “off-target” antigen on a healthy cell;

[0717] and;
[0718] an inhibitory transmembrane polypeptide having a polypeptide sequence of more than 80%, preferably 90% and more preferably 95% identity and even more preferably 100% identity with SEQ ID NO: 33 (human TR10D), SEQ ID NO: 34 (human TR10A) and SEQ ID NO: 35 (human TR10B);
[0719] and a CS1 specific chimeric antigen receptor (CAR) (as P-CAR) which comprises in the engineered immune cell in combination with the N-CAR; said CS1 specific chimeric antigen receptor (CAR) containing at least one transmembrane polypeptide which includes at least one extra-binding domain recognizing specifically the CS1 antigen, and an intracellular signaling domain, optionally with co-stimulatory domain.

[0720] According to an embodiment, the isolated immune cell includes at least a N-CAR which comprises at least:

[0721] an extracellular binding domain, which is able to bind to an “off-target” antigen on a healthy cell;

[0722] and;
[0723] an inhibitory transmembrane polypeptide having a polypeptide sequence of SEQ ID NO: 33 (human TR10D), SEQ ID NO: 34 (human TR10A) and SEQ ID NO: 35 (human TR10B);
[0724] and a CS1 specific chimeric antigen receptor (CAR) (as P-CAR) which comprises in the engineered immune cell in combination with the N-CAR; said CS1 specific chimeric antigen receptor (CAR) containing at least one transmembrane polypeptide which includes at least one extra-binding domain recognizing specifically the CS1 antigen, and an intracellular signaling domain, optionally with co-stimulatory domain.

[0725] According to a preferred embodiment, the isolated immune cell includes at least a N-CAR which comprises at least:
[0726] an extracellular binding domain, comprising a polypeptide sequence sharing more than 80%, preferably 90% and more preferably 95% and even more preferably 100% identity identity with SEQ ID NO: 92 (troponin C), SEQ ID NO: 93 (beta-1 integrin), SEQ ID NO: 94 (CCKBR antigen), SEQ ID NO: 95 (GALR1 antigen) or SEQ ID NO: 96 (CUBN antigen); and;
[0727] an inhibitory transmembrane polypeptide having a polypeptide sequence of more than 80%, preferably 90% and more preferably 95% identity and even more preferably 100% identity with SEQ ID NO: 33 (human TR10D), SEQ ID NO: 34 (human TR10A) and SEQ ID NO: 35 (human TR10B);

[0728] and a CS1 specific chimeric antigen receptor (CAR) (as P-CAR) which comprises in the engineered immune cell in combination with the N-CAR; said CS1 specific chimeric antigen receptor (CAR) having one of the polypeptide structure selected from V1 to V6, preferably V1, V3 and V5 as illustrated in FIG. 1, said structure comprising an extra cellular ligand binding-domain comprising VH and VL from a monoclonal anti-CS1 antibody, a hinge, a transmembrane domain and a cytoplasmic domain including a CD3 zeta signaling domain and a co-stimulatory domain from 4-1BB.

[0729] According to a preferred embodiment, the isolated immune cell includes at least a N-CAR which comprises at least:
[0730] an extracellular binding domain, comprising a polypeptide sequence sharing more than 80%, preferably 90% and more preferably 95% and even more preferably 100% identity identity with SEQ ID NO: 92 (troponin C), SEQ ID NO: 93 (beta-1 integrin), SEQ ID NO: 94 (CCKBR antigen), SEQ ID NO: 95 (GALR1 antigen) or SEQ ID NO: 96 (CUBN antigen); and;
[0731] an inhibitory transmembrane polypeptide having a polypeptide sequence of SEQ ID NO: 33 (human TR10D), SEQ ID NO: 34 (human TR10A) and SEQ ID NO: 35 (human TR10B);

[0732] and a CS1 specific chimeric antigen receptor (CAR) (as P-CAR) which comprises in the engineered immune cell in combination with the N-CAR; said CS1 specific chimeric antigen receptor (CAR) having one of the polypeptide structure selected from V1 to V6, preferably V1, V3 and V5 as illustrated in FIG. 1, said structure comprising an extra cellular ligand binding-domain comprising VH and VL from a monoclonal anti-CS1 antibody, a hinge, a transmembrane domain and a cytoplasmic domain including a CD3 zeta signaling domain and a co-stimulatory domain from 4-1BB.

[0733] Preferably, the above CS1 specific chimeric antigen receptor (CAR) (as P-CAR) comprises an extra cellular ligand binding-domain in which VH and VL chains derive from a monoclonal anti-CS1 antibody, such as the murine scFv Luc63, Luc90, Luc34, LucX1 and LucX2 antibodies (such as described in WO2015121454A1 SEQ ID NO. 38 to 47) optionally humanized.

[0734] According to an embodiment, the isolated immune cell includes at least a N-CAR which comprises at least:
[0735] an extracellular binding domain, which is able to bind to an “off-target” antigen on a healthy cell;
[0736] an inhibitory transmembrane polypeptide having a sequence with more than 80%, preferably 90% and more preferably 95% identity and even more preferably 100% identity with SEQ ID NO: 1 (human KI2L2), SEQ ID NO: 2 (human KI2L1), SEQ ID NO:3 (human FCG2B), SEQ ID NO:4 (human KI2L3), SEQ ID NO: 5 (human KI3L2), SEQ ID NO:6 (human KI2L4), SEQ ID NO:7 (human KI3L1), SEQ ID NO:8 (human KI2LA), SEQ ID NO:9 (human MILR1), SEQ ID NO:10 (human LIRB4), SEQ ID NO:11 (human LIRB3), SEQ ID NO:12 (human KI3L3), SEQ ID NO:15 (human LIRB5), SEQ ID NO:16 (human LIRB2), SEQ ID NO:18 (human FCRL4), SEQ ID NO:23 (human FCRL5), SEQ ID NO:24 (human FCRL2), SEQ ID NO: 25 (human FCRL1), SEQ ID NO:27 (human FCRL3), SEQ ID NO:28 (human MPZL1), SEQ ID NO:29 (human PILRA) or SEQ ID NO:30 (human PVR);
[0737] and a ROR1 specific chimeric antigen receptor (CAR) (as P-CAR) which comprises in the engineered immune cell in combination with the N-CAR; said ROR1 specific chimeric antigen receptor (CAR) containing at least one transmembrane polypeptide which includes at least one extra-binding domain recognizing specifically the CS1 antigen, and an intracellular signaling domain, optionally with co-stimulatory domain.

[0738] According to an embodiment, the isolated immune cell includes at least a N-CAR which comprises at least:
[0739] an extracellular binding domain, which is able to bind to an “off-target” antigen on a healthy cell;
[0740] an inhibitory transmembrane polypeptide having a sequence of SEQ ID NO: 1 (human KI2L2), SEQ ID NO: 2 (human KI2L1), SEQ ID NO:3 (human FCG2B), SEQ ID NO:4 (human KI2L3), SEQ ID NO: 5 (human KI3L2), SEQ ID NO:6 (human KI2L4), SEQ ID NO:7 (human KI3L1), SEQ ID NO:8 (human KI2LA), SEQ ID NO:9 (human MILR1), SEQ ID NO:10 (human LIRB4), SEQ ID NO:11 (human LIRB3), SEQ ID NO:12 (human KI3L3), SEQ ID NO:15 (human LIRB5), SEQ ID NO:16 (human LIRB2), SEQ ID NO:18 (human FCRL4), SEQ ID NO:23 (human FCRL5), SEQ ID NO:24 (human FCRL2), SEQ ID NO: 25 (human FCRL1), SEQ ID NO:27 (human FCRL3), SEQ ID NO:28 (human MPZL1), SEQ ID NO:29 (human PILRA) or SEQ ID NO:30 (human PVR);
[0741] and a ROR1 specific chimeric antigen receptor (CAR) (as P-CAR) which comprises in the engineered immune cell in combination with the N-CAR; said ROR1 specific chimeric antigen receptor (CAR) containing at least one transmembrane polypeptide which includes at least one extra-binding domain recognizing specifically the CS1 antigen, and an intracellular signaling domain, optionally with co-stimulatory domain.

[0742] According to an embodiment, the isolated immune cell includes at least a N-CAR which comprises at least:
[0743] an extracellular binding domain, comprising a polypeptide sequence sharing more than 80%, preferably 90% and more preferably 95% and even more preferably 100% identity identity with SEQ ID NO: 92 (troponin C), SEQ ID NO: 93 (beta-1 integrin), SEQ ID NO: 94 (CCKBR antigen), SEQ ID NO: 95 (GALR1 antigen) or SEQ ID NO: 96 (CUBN antigen);
[0744] an inhibitory transmembrane polypeptide having of more than 80%, preferably 90% and more preferably 95% identity and even more preferably 100% identity with SEQ ID NO: 1 (human KI2L2), SEQ ID NO: 2 (human KI2L1), SEQ ID NO:3 (human FCG2B), SEQ ID NO:4 (human KI2L3), SEQ ID NO: 5 (human KI3L2), SEQ ID NO:6 (human KI2L4), SEQ ID NO:7 (human KI3L1), SEQ ID NO:8 (human KI2LA), SEQ ID NO:9 (human MILR1), SEQ ID NO:10 (human LIRB4), SEQ ID NO:11 (human LIRB3), SEQ ID NO:12 (human KI3L3), SEQ ID NO:15 (human LIRB5), SEQ ID NO:16 (human LIRB2), SEQ ID NO:18 (human FCRL4), SEQ ID NO:23 (human FCRL5), SEQ ID NO:24 (human FCRL2), SEQ ID NO: 25 (human FCRL1), SEQ ID NO:27 (human FCRL3), SEQ ID NO:28 (human MPZL1), SEQ ID NO:29 (human PILRA) or SEQ ID NO:30 (human PVR);

[0745] and a ROR1 specific chimeric antigen receptor (CAR) (as P-CAR) which comprises in the engineered immune cell in combination with the N-CAR; said ROR1 specific chimeric antigen receptor (CAR) having one of the polypeptide structure selected from V1 to V6, preferably V1, V3 and V5 as illustrated in FIG. 1, said structure comprising an extra cellular ligand binding-domain comprising VH and VL from a monoclonal anti-ROR1 antibody, a hinge, a transmembrane domain and a cytoplasmic domain including a CD3 zeta signaling domain and a co-stimulatory domain from 4-1BB.

[0746] According to an embodiment, the isolated immune cell includes at least a N-CAR which comprises at least:
[0747] an extracellular binding domain, comprising a polypeptide sequence sharing more than 80%, preferably 90% and more preferably 95% and even more preferably 100% identity identity with SEQ ID NO: 92 (troponin C), SEQ ID NO: 93 (beta-1 integrin), SEQ ID NO: 94 (CCKBR antigen), SEQ ID NO: 95 (GALR1 antigen) or SEQ ID NO: 96 (CUBN antigen);
[0748] an inhibitory transmembrane polypeptide having a of SEQ ID NO: 1 (human KI2L2), SEQ ID NO: 2 (human KI2L1), SEQ ID NO:3 (human FCG2B), SEQ ID NO:4 (human KI2L3), SEQ ID NO: 5 (human KI3L2), SEQ ID NO:6 (human KI2L4), SEQ ID NO:7 (human KI3L1), SEQ ID NO:8 (human KI2LA), SEQ ID NO:9 (human MILR1), SEQ ID NO:10 (human LIRB4), SEQ ID NO:11 (human LIRB3), SEQ ID NO:12 (human KI3L3), SEQ ID NO:15 (human LIRB5), SEQ ID NO:16 (human LIRB2), SEQ ID NO:18 (human FCRL4), SEQ ID NO:23 (human FCRL5), SEQ ID NO:24 (human FCRL2), SEQ ID NO: 25 (human FCRL1), SEQ ID NO:27 (human FCRL3), SEQ ID NO:28 (human MPZL1), SEQ ID NO:29 (human PILRA) or SEQ ID NO:30 (human PVR);

[0749] and a ROR1 specific chimeric antigen receptor (CAR) (as P-CAR) which comprises in the engineered immune cell in combination with the N-CAR; said ROR1 specific chimeric antigen receptor (CAR) having one of the polypeptide structure selected from V1 to V6, preferably V1, V3 and V5 as illustrated in FIG. 1, said structure comprising an extra cellular ligand binding-domain comprising VH and VL from a monoclonal anti-ROR1 antibody, a hinge, a transmembrane domain and a cytoplasmic domain including a CD3 zeta signaling domain and a co-stimulatory domain from 4-1BB.

[0750] According to an embodiment, the isolated immune cell includes at least a N-CAR which comprises at least:
[0751] an extracellular binding domain, which is able to bind to an “off-target” antigen on a healthy cell;

[0752] and;
[0753] an inhibitory transmembrane polypeptide having a polypeptide sequence of more than 80%, preferably 90% and more preferably 95% identity and even more preferably 100% identity with SEQ ID NO: 33 (human TR10D), SEQ ID NO: 34 (human TR10A) and SEQ ID NO: 35 (human TR10B);
[0754] and a ROR1 specific chimeric antigen receptor (CAR) (as P-CAR) which comprises in the engineered immune cell in combination with the N-CAR; said ROR1 specific chimeric antigen receptor (CAR) containing at least one transmembrane polypeptide which includes at least one extra-binding domain recognizing specifically the ROR1 antigen, and an intracellular signaling domain, optionally with co-stimulatory domain.

[0755] According to an embodiment, the isolated immune cell includes at least a N-CAR which comprises at least:
[0756] an extracellular binding domain, which is able to bind to an “off-target” antigen on a healthy cell;

[0757] and;
[0758] an inhibitory transmembrane polypeptide having a polypeptide sequence of SEQ ID NO: 33 (human TR10D), SEQ ID NO: 34 (human TR10A) and SEQ ID NO: 35 (human TR10B);
[0759] and a ROR1 specific chimeric antigen receptor (CAR) (as P-CAR) which comprises in the engineered immune cell in combination with the N-CAR; said ROR1 specific chimeric antigen receptor (CAR) containing at least one transmembrane polypeptide which includes at least one extra-binding domain recognizing specifically the ROR1 antigen, and an intracellular signaling domain, optionally with co-stimulatory domain.

[0760] According to a preferred embodiment, the isolated immune cell includes at least a N-CAR which comprises at least:
[0761] an extracellular binding domain, comprising a polypeptide sequence sharing more than 80%, preferably 90% and more preferably 95% and even more preferably 100% identity identity with SEQ ID NO: 92 (troponin C), SEQ ID NO: 93 (beta-1 integrin), SEQ ID NO: 94 (CCKBR antigen), SEQ ID NO: 95 (GALR1 antigen) or SEQ ID NO: 96 (CUBN antigen); and;
[0762] an inhibitory transmembrane polypeptide having a polypeptide sequence of more than 80%, preferably 90% and more preferably 95% identity and even more preferably 100% identity with SEQ ID NO: 33 (human TR10D), SEQ ID NO: 34 (human TR10A) and SEQ ID NO: 35 (human TR10B);

[0763] and a ROR1 specific chimeric antigen receptor (CAR) (as P-CAR) which comprises in the engineered immune cell in combination with the N-CAR; said ROR1 specific chimeric antigen receptor (CAR) having one of the polypeptide structure selected from V1 to V6, preferably V1, V3 and V5 as illustrated in FIG. 1, said structure comprising an extra cellular ligand binding-domain comprising VH and VL from a monoclonal anti-ROR1 antibody, a hinge, a transmembrane domain and a cytoplasmic domain including a CD3 zeta signaling domain and a co-stimulatory domain from 4-1BB.

[0764] According to a preferred embodiment, the isolated immune cell includes at least a N-CAR which comprises at least:
[0765] an extracellular binding domain, comprising a polypeptide sequence sharing more than 80%, preferably 90% and more preferably 95% and even more preferably 100% identity identity with SEQ ID NO: 92 (troponin C), SEQ ID NO: 93 (beta-1 integrin), SEQ ID NO: 94 (CCKBR antigen), SEQ ID NO: 95 (GALR1 antigen) or SEQ ID NO: 96 (CUBN antigen); and;
[0766] an inhibitory transmembrane polypeptide having a polypeptide sequence of SEQ ID NO: 33 (human TR10D), SEQ ID NO: 34 (human TR10A) and SEQ ID NO: 35 (human TR10B);

[0767] and a ROR1 specific chimeric antigen receptor (CAR) (as P-CAR) which comprises in the engineered immune cell in combination with the N-CAR; said ROR1 specific chimeric antigen receptor (CAR) having one of the polypeptide structure selected from V1 to V6, preferably V1, V3 and V5 as illustrated in FIG. 1, said structure comprising an extra cellular ligand binding-domain comprising VH and VL from a monoclonal anti-ROR1 antibody, a hinge, a transmembrane domain and a cytoplasmic domain including a CD3 zeta signaling domain and a co-stimulatory domain from 4-1BB.

[0768] According to an embodiment, the isolated immune cell includes at least a N-CAR which comprises at least:
[0769] an extracellular binding domain, which binds to an “off-site” cell surface antigen expressed in healthy cells or in immune cells;
[0770] an inhibitory transmembrane polypeptide having a sequence with more than 80%, preferably 90% and more preferably 95% identity and even more preferably 100% identity with SEQ ID NO: 1 (human KI2L2), SEQ ID NO: 2 (human KI2L1), SEQ ID NO:3 (human FCG2B), SEQ ID NO:4 (human KI2L3), SEQ ID NO: 5 (human KI3L2), SEQ ID NO:6 (human KI2L4), SEQ ID NO:7 (human KI3L1), SEQ ID NO:8 (human KI2LA), SEQ ID NO:9 (human MILR1), SEQ ID NO:10 (human LIRB4), SEQ ID NO:11 (human LIRB3), SEQ ID NO:12 (human KI3L3), SEQ ID NO:15 (human LIRB5), SEQ ID NO:16 (human LIRB2), SEQ ID NO:18 (human FCRL4), SEQ ID NO:23 (human FCRL5), SEQ ID NO:24 (human FCRL2), SEQ ID NO: 25 (human FCRL1), SEQ ID NO:27 (human FCRL3), SEQ ID NO:28 (human MPZL1), SEQ ID NO:29 (human PILRA) or SEQ ID NO:30 (human PVR);

[0771] and a CLL-1 specific chimeric antigen receptor (CAR) (as P-CAR) which comprises in the engineered immune cell in combination with the N-CAR; said CLL-1 specific chimeric antigen receptor (CAR) having one of the polypeptide structure selected from V1 to V6, preferably V1, V3 and V5 as illustrated in FIG. 1, said structure comprising an extra cellular ligand binding-domain comprising VH and VL from a monoclonal anti-CLL-1 antibody, a hinge, a transmembrane domain and a cytoplasmic domain including a CD3 zeta signaling domain and a co-stimulatory domain from 4-1BB.

[0772] According to an embodiment, the isolated immune cell includes at least a N-CAR which comprises at least:
[0773] an extracellular binding domain, which binds to an “off-site” cell surface antigen expressed in healthy cells or in immune cells;
[0774] an inhibitory transmembrane polypeptide having a sequence of SEQ ID NO: 1 (human KI2L2), SEQ ID NO: 2 (human KI2L1), SEQ ID NO:3 (human FCG2B), SEQ ID NO:4 (human KI2L3), SEQ ID NO: 5 (human KI3L2), SEQ ID NO:6 (human KI2L4), SEQ ID NO:7 (human KI3L1), SEQ ID NO:8 (human KI2LA), SEQ ID NO:9 (human MILR1), SEQ ID NO:10 (human LIRB4), SEQ ID NO:11 (human LIRB3), SEQ ID NO:12 (human KI3L3), SEQ ID NO:15 (human LIRB5), SEQ ID NO:16 (human LIRB2), SEQ ID NO:18 (human FCRL4), SEQ ID NO:23 (human FCRL5), SEQ ID NO:24 (human FCRL2), SEQ ID NO: 25 (human FCRL1), SEQ ID NO:27 (human FCRL3), SEQ ID NO:28 (human MPZL1), SEQ ID NO:29 (human PILRA) or SEQ ID NO:30 (human PVR);

[0775] and a CLL-1 specific chimeric antigen receptor (CAR) (as P-CAR) which comprises in the engineered immune cell in combination with the N-CAR; said CLL-1 specific chimeric antigen receptor (CAR) having one of the polypeptide structure selected from V1 to V6, preferably V1, V3 and V5 as illustrated in FIG. 1, said structure comprising an extra cellular ligand binding-domain comprising VH and VL from a monoclonal anti-CLL-1 antibody, a hinge, a transmembrane domain and a cytoplasmic domain including a CD3 zeta signaling domain and a co-stimulatory domain from 4-1BB.

[0776] According to a preferred embodiment, the isolated immune cell includes at least a N-CAR which comprises at least:
[0777] an extracellular binding domain, which binds to an “off-site” cell surface antigen expressed in healthy cells or in immune cells;
[0778] an inhibitory transmembrane polypeptide having a polypeptide sequence of more than 80%, preferably 90% and more preferably 95% identity and even more preferably 100% identity with SEQ ID NO: 33 (human TR10D), SEQ ID NO: 34 (human TR10A) and SEQ ID NO: 35 (human TR10B);

[0779] and a CLL-1 specific chimeric antigen receptor (CAR) (as P-CAR) which comprises in the engineered immune cell in combination with the N-CAR; said CLL-1 specific chimeric antigen receptor (CAR) having one of the polypeptide structure selected from V1 to V6, preferably V1, V3 and V5 as illustrated in FIG. 1, said structure comprising an extra cellular ligand binding-domain comprising VH and VL from a monoclonal anti-CLL-1 antibody, a hinge, a transmembrane domain and a cytoplasmic domain including a CD3 zeta signaling domain and a co-stimulatory domain from 4-1BB.

[0780] According to a preferred embodiment, the isolated immune cell includes at least a N-CAR which comprises at least:
[0781] an extracellular binding domain, which binds to an “off-site” cell surface antigen expressed in healthy cells or in immune cells;
[0782] an inhibitory transmembrane polypeptide having a polypeptide sequence of SEQ ID NO: 33 (human TR10D), SEQ ID NO: 34 (human TR10A) and SEQ ID NO: 35 (human TR10B);

[0783] and a CLL-1 specific chimeric antigen receptor (CAR) (as P-CAR) which comprises in the engineered immune cell in combination with the N-CAR; said CLL-1 specific chimeric antigen receptor (CAR) having one of the polypeptide structure selected from V1 to V6, preferably V1, V3 and V5 as illustrated in FIG. 1, said structure comprising an extra cellular ligand binding-domain comprising VH and VL from a monoclonal anti-CLL-1 antibody, a hinge, a transmembrane domain and a cytoplasmic domain including a CD3 zeta signaling domain and a co-stimulatory domain from 4-1BB.

[0784] As examples, said V_{L} and V_{H} are preferably selected from the antibodies referred to in the literature as SCO02-357, SCO2-378 and SCO2-161 in WO2005/00894 (Applicant: Crucell Holland BV); M26, M31, G4, M22, M29, M2, M5, G12 in WO2013/169625 (Applicant: Cellerant Therapeutics); and 21.26, 1075.7 in WO2009/051974 (Applicant: Nuvelo Inc).

[0785] According to a preferred embodiment, the isolated immune cell includes at least a N-CAR which comprises at least:
[0786] an extracellular binding domain, which is able to bind to an “off-target” antigen on a healthy or immune cell and;
[0787] an inhibitory transmembrane polypeptide having a sequence consisting essentially of amino acids No 201-375 from SEQ ID NO:8 (human KI2LA), amino acids No 206-348 from SEQ ID NO:2 (human KIR2DL1), amino acids No 206-348 from SEQ ID NO:1 (human KIR2DL2), amino acids No 206-341 from SEQ ID NO:4 (human KIR2DL3), amino acids No 206-348 from SEQ ID NO:2 (human KIR2DL1), amino acids No 203-377 from SEQ ID NO:6 (human KIR2DL4), amino acids No 301-444 from SEQ ID NO:7 (human KIR3DL1), amino acids No 301-455 from SEQ ID NO:5 (human KIR3DL2), amino acids No 204-310 from SEQ ID NO:24 (human FRGR2B), amino acids No 214-343 from SEQ ID NO:9 (human MILR1), amino acids No 216-448 from SEQ ID NO:10 (human LIRB4), amino acids No 420-631 from SEQ ID NO:11 (human LIRB3), amino acids No 296-410 from SEQ ID NO:12 (human KI3L3), amino acids No 419-590 from SEQ ID NO:15 (human LIRB5), amino acids No 420-598 from SEQ ID NO:16 (human LIRB2), amino acids No 375-515 from SEQ ID NO:18 (human FCRL4), amino acids No 753-977 from SEQ ID NO:23 (human FCRL5), amino acids No 388-508 from SEQ ID NO:24 (human FCRL2), amino acids No 292-429 from SEQ ID NO: 25 (human FCRL1), amino acids No 564-734 from SEQ ID NO:27 (human FCRL3), amino acids No 147-269 from SEQ ID NO:28 (human MPZL1), amino acids No 151-303 from SEQ ID NO:29 (human PILRA), amino acids No 329-417 from SEQ ID NO:30 (human PVR), amino acids No 229-325 from SEQ ID NO:36 (human CD200 receptor1), amino acids No 181-386 from SEQ ID NO:33 (human TR10D), amino acids No 230-468 from SEQ ID NO:34 (human TR10A) or amino acids No 179-440 from SEQ ID NO:35 (human TR10B);

[0788] and a P-CAR which comprises in the engineered immune cell in combination with the N-CAR; said P-CAR comprising one transmembrane polypeptide comprising at least one extracellular ligand-binding domain able to bind to CD123 antigen, and one signal-transducing domain, optionally with a co-stimulatory domain.

[0789] According to another preferred embodiment, the isolated immune cell includes at least a N-CAR which comprises at least:
[0790] an extracellular binding domain, which is able to bind to an “off-target” antigen on a healthy or immune cell and;
[0791] an inhibitory transmembrane polypeptide having a sequence consisting essentially of amino acids No 201-375 from SEQ ID NO:8 (human KI2LA), amino acids No 206-348 from SEQ ID NO:2 (human KIR2DL1), amino acids No 206-348 from SEQ ID NO:1 (human KIR2DL2), amino acids No 206-341 from SEQ ID NO:4 (human KIR2DL3), amino acids No 206-348 from SEQ ID NO:2 (human KIR2DL1), amino acids No 203-377 from SEQ ID NO:6 (human KIR2DL4), amino acids No 301-444 from SEQ ID NO:7 (human KIR3DL1), amino acids No 301-455 from SEQ ID NO:5 (human KIR3DL2), amino acids No 204-310 from SEQ ID NO:24 (human FRGR2B), amino acids No 214-343 from SEQ ID NO:9 (human MILR1), amino acids No 216-448 from SEQ ID NO:10 (human LIRB4), amino acids No 420-631 from SEQ ID NO:11 (human LIRB3), amino acids No 296-410 from SEQ ID NO:12 (human KI3L3), amino acids No 419-590 from SEQ ID NO:15 (human LIRB5), amino acids No 420-598 from SEQ ID NO:16 (human LIRB2), amino acids No 375-515 from SEQ ID NO:18 (human FCRL4), amino acids No 753-977 from SEQ ID NO:23 (human FCRL5), amino acids No 388-508 from SEQ ID NO:24 (human FCRL2), amino acids No 292-429 from SEQ ID NO: 25 (human FCRL1), amino acids No 564-734 from SEQ ID NO:27 (human FCRL3), amino acids No 147-269 from SEQ ID NO:28 (human MPZL1), amino acids No 151-303 from SEQ ID NO:29 (human PILRA), amino acids No 329-417 from SEQ ID NO:30 (human PVR), amino acids No 229-325 from SEQ ID NO:36 (human CD200 receptor1), amino acids No 181-386 from SEQ ID NO:33 (human TR10D), amino acids No 230-468 from SEQ ID NO:34 (human TR10A) or amino acids No 179-440 from SEQ ID NO:35 (human TR10B);

[0792] and a P-CAR which comprises in the engineered immune cell in combination with the N-CAR; said P-CAR comprising one transmembrane polypeptide comprising at least one extracellular ligand-binding domain able to bind to CD123 antigen, and one signal-transducing domain, optionally with a co-stimulatory domain.

[0793] According to an embodiment, the isolated immune cell includes at least a N-CAR which comprises at least:
[0794] an extracellular binding domain, comprising a polypeptide sequence sharing more than 80%, preferably 90% and more preferably 95% identity with SEQ ID NO: 81 (CD4 antigen), SEQ ID NO: 82 (CD20 antigen), SEQ ID NO: 83 (CD22 antigen), SEQ ID NO: 84 (CD25 antigen) or SEQ ID NO: 85 (MUC1 antigen);
[0795] an inhibitory transmembrane polypeptide having a sequence consisting essentially of amino acids No 201-375 from SEQ ID NO:8 (human KI2LA), amino acids No 206-348 from SEQ ID NO:2 (human KIR2DL1), amino acids No 206-348 from SEQ ID NO:1 (human KIR2DL2), amino acids No 206-341 from SEQ ID NO:4 (human KIR2DL3), amino acids No 206-348 from SEQ ID NO:2 (human KIR2DL1), amino acids No 203-377 from SEQ ID NO:6 (human KIR2DL4), amino acids No 301-444 from SEQ ID NO:7 (human KIR3DL1), amino acids No 301-455 from SEQ ID NO:5 (human KIR3DL2), amino acids No 204-310 from SEQ ID NO:24 (human FRGR2B), amino acids No 214-343 from SEQ ID NO:9 (human MILR1), amino acids No 216-448 from SEQ ID NO:10 (human LIRB4), amino acids No 420-631 from SEQ ID NO:11 (human LIRB3), amino acids No 296-410 from SEQ ID NO:12 (human KI3L3), amino acids No 419-590 from SEQ ID NO:15 (human LIRB5), amino acids No 420-598 from SEQ ID NO:16 (human LIRB2), amino acids No 375-515 from SEQ ID NO:18 (human FCRL4), amino acids No 753-977 from SEQ ID NO:23 (human FCRL5), amino acids No 388-508 from SEQ ID NO:24 (human FCRL2), amino acids No 292-429 from SEQ ID NO: 25 (human FCRL1), amino acids No 564-734 from SEQ ID NO:27 (human FCRL3), amino acids No 147-269 from SEQ ID NO:28 (human MPZL1), amino acids No 151-303 from SEQ ID NO:29 (human PILRA), amino acids No 329-417 from SEQ ID NO:30 (human PVR), amino acids No 229-325 from SEQ ID NO:36 (human CD200 receptor1), amino acids No 181-386 from SEQ ID NO:33 (human TR10D), amino acids No 230-468 from SEQ ID NO:34 (human TR10A) or amino acids No 179-440 from SEQ ID NO:35 (human TR10B);

[0796] and a P-CAR which comprises in the engineered immune cell in combination with the N-CAR; said P-CAR comprising one transmembrane polypeptide comprising at least one extracellular ligand-binding domain able to bind to CD123 antigen, and one signal-transducing domain, optionally with a co-stimulatory domain.

[0797] According to another preferred embodiment, the isolated immune cell includes at least a N-CAR which comprises at least:
[0798] an extracellular binding domain, comprising a polypeptide sequence sharing more than 80%, preferably 90% and more preferably 95% identity with SEQ ID NO: XX (CD4 antigen), SEQ ID NO: XX (CD20 antigen), SEQ ID NO: XX (CD22 antigen), SEQ ID NO: XX (CD25 antigen) or SEQ ID NO: XX (MUC1 antigen);
[0799] an inhibitory transmembrane polypeptide having a sequence consisting essentially of amino acids No 201-375 from SEQ ID NO:8 (human KI2LA), amino acids No 206-348 from SEQ ID NO:2 (human KIR2DL1), amino acids No 206-348 from SEQ ID NO:1 (human KIR2DL2), amino acids No 206-341 from SEQ ID NO:4 (human KIR2DL3), amino acids No 206-348 from SEQ ID NO:2 (human KIR2DL1), amino acids No 203-377 from SEQ ID NO:6 (human KIR2DL4), amino acids No 301-444 from SEQ ID NO:7 (human KIR3DL1), amino acids No 301-455 from SEQ ID NO:5 (human KIR3DL2), amino acids No 204-310 from SEQ ID NO:24 (human FRGR2B), amino acids No 214-343 from SEQ ID NO:9 (human MILR1), amino acids No 216-448 from SEQ ID NO:10 (human LIRB4), amino acids No 420-631 from SEQ ID NO:11 (human LIRB3), amino acids No 296-410 from SEQ ID NO:12 (human KI3L3), amino acids No 419-590 from SEQ ID NO:15 (human LIRB5), amino acids No 420-598 from SEQ ID NO:16 (human LIRB2), amino acids No 375-515 from SEQ ID NO:18 (human FCRL4), amino acids No 753-977 from SEQ ID NO:23 (human FCRL5), amino acids No 388-508 from SEQ ID NO:24 (human FCRL2), amino acids No 292-429 from SEQ ID NO: 25 (human FCRL1), amino acids No 564-734 from SEQ ID NO:27 (human FCRL3), amino acids No 147-269 from SEQ ID NO:28 (human MPZL1), amino acids No 151-303 from SEQ ID NO:29 (human PILRA), amino acids No 329-417 from SEQ ID NO:30 (human PVR), amino acids No 229-325 from SEQ ID NO:36 (human CD200 receptor1), amino acids No 181-386 from SEQ ID NO:33 (human TR10D), amino acids No 230-468 from SEQ ID NO:34 (human TR10A) or amino acids No 179-440 from SEQ ID NO:35 (human TR10B);

[0800] and a P-CAR which comprises in the engineered immune cell in combination with the N-CAR; said P-CAR comprising one transmembrane polypeptide comprising at least one extracellular ligand-binding domain able to bind to CD123 antigen, and one signal-transducing domain, optionally with a co-stimulatory domain.

[0801] According to a preferred embodiment, the isolated immune cell includes at least a N-CAR which comprises at least:
[0802] an extracellular binding domain, which is able to bind to an “off-target” antigen on a healthy or immune cell and;
[0803] an inhibitory transmembrane polypeptide having a polypeptide sequence of SEQ ID NO: 33 (human TR10D), SEQ ID NO: 34 (human TR10A) and SEQ ID NO: 35 (human TR10B).

[0804] and a P-CAR which comprises in the engineered immune cell in combination with the N-CAR; said P-CAR comprising one transmembrane polypeptide comprising at least one extracellular ligand-binding domain able to bind to CD123 antigen, and one signal-transducing domain, optionally with a co-stimulatory domain.

[0805] According to another preferred embodiment, the isolated immune cell includes at least a N-CAR which comprises at least:
[0806] an extracellular binding domain, which is able to bind to an “off-target” antigen on a healthy or immune cell and;
[0807] an inhibitory transmembrane polypeptide having a sequence consisting essentially of amino acids No 201-375 from SEQ ID NO:8 (human KI2LA), amino acids No 206-348 from SEQ ID NO:2 (human KIR2DL1), amino acids No 206-348 from SEQ ID NO:1 (human KIR2DL2), amino acids No 206-341 from SEQ ID NO:4 (human KIR2DL3), amino acids No 206-348 from SEQ ID NO:2 (human KIR2DL1), amino acids No 203-377 from SEQ ID NO:6 (human KIR2DL4), amino acids No 301-444 from SEQ ID NO:7 (human KIR3DL1), amino acids No 301-455 from SEQ ID NO:5 (human KIR3DL2), amino acids No 204-310 from SEQ ID NO:24 (human FRGR2B), amino acids No 214-343 from SEQ ID NO:9 (human MILR1), amino acids No 216-448 from SEQ ID NO:10 (human LIRB4), amino acids No 420-631 from SEQ ID NO:11 (human LIRB3), amino acids No 296-410 from SEQ ID NO:12 (human KI3L3), amino acids No 419-590 from SEQ ID NO:15 (human LIRB5), amino acids No 420-598 from SEQ ID NO:16 (human LIRB2), amino acids No 375-515 from SEQ ID NO:18 (human FCRL4), amino acids No 753-977 from SEQ ID NO:23 (human FCRL5), amino acids No 388-508 from SEQ ID NO:24 (human FCRL2), amino acids No 292-429 from SEQ ID NO: 25 (human FCRL1), amino acids No 564-734 from SEQ ID NO:27 (human FCRL3), amino acids No 147-269 from SEQ ID NO:28 (human MPZL1), amino acids No 151-303 from SEQ ID NO:29 (human PILRA), amino acids No 329-417 from SEQ ID NO:30 (human PVR), amino acids No 229-325 from SEQ ID NO:36 (human CD200 receptor1), amino acids No 181-386 from SEQ ID NO:33 (human TR10D), amino acids No 230-468 from SEQ ID NO:34 (human TR10A) or amino acids No 179-440 from SEQ ID NO:35 (human TR10B);

[0808] and a P-CAR which comprises in the engineered immune cell in combination with the N-CAR; said P-CAR comprising one transmembrane polypeptide comprising at least one extracellular ligand-binding domain able to bind to CD123 antigen, and one signal-transducing domain, optionally with a co-stimulatory domain.

[0809] According to a preferred embodiment, the isolated immune cell includes at least a N-CAR which comprises at least:
[0810] an extracellular binding domain, comprising a polypeptide sequence sharing more than 80%, preferably 90% and more preferably 95% identity with SEQ ID NO: XX (CD4 antigen), SEQ ID NO: XX (CD20 antigen), SEQ ID NO: XX (CD22 antigen), SEQ ID NO: XX (CD25 antigen) or SEQ ID NO: XX (MUC1 antigen)

[0811] and;
[0812] an inhibitory transmembrane polypeptide having a sequence consisting essentially of amino acids No 201-375 from SEQ ID NO:8 (human KI2LA), amino acids No 206-348 from SEQ ID NO:2 (human KIR2DL1), amino acids No 206-348 from SEQ ID NO:1 (human KIR2DL2), amino acids No 206-341 from SEQ ID NO:4 (human KIR2DL3), amino acids No 206-348 from SEQ ID NO:2 (human KIR2DL1), amino acids No 203-377 from SEQ ID NO:6 (human KIR2DL4), amino acids No 301-444 from SEQ ID NO:7 (human KIR3DL1), amino acids No 301-455 from SEQ ID NO:5 (human KIR3DL2), amino acids No 204-310 from SEQ ID NO:24 (human FRGR2B), amino acids No 214-343 from SEQ ID NO:9 (human MILR1), amino acids No 216-448 from SEQ ID NO:10 (human LIRB4), amino acids No 420-631 from SEQ ID NO:11 (human LIRB3), amino acids No 296-410 from SEQ ID NO:12 (human KI3L3), amino acids No 419-590 from SEQ ID NO:15 (human LIRB5), amino acids No 420-598 from SEQ ID NO:16 (human LIRB2), amino acids No 375-515 from SEQ ID NO:18 (human FCRL4), amino acids No 753-977 from SEQ ID NO:23 (human FCRL5), amino acids No 388-508 from SEQ ID NO:24 (human FCRL2), amino acids No 292-429 from SEQ ID NO: 25 (human FCRL1), amino acids No 564-734 from SEQ ID NO:27 (human FCRL3), amino acids No 147-269 from SEQ ID NO:28 (human MPZL1), amino acids No 151-303 from SEQ ID NO:29 (human PILRA), amino acids No 329-417 from SEQ ID NO:30 (human PVR), amino acids No 229-325 from SEQ ID NO:36 (human CD200 receptor1), amino acids No 181-386 from SEQ ID NO:33 (human TR10D), amino acids No 230-468 from SEQ ID NO:34 (human TR10A) or amino acids No 179-440 from SEQ ID NO:35 (human TR10B);
[0813] and a CD123 specific chimeric antigen receptor (CAR) (as P-CAR) which comprises in the engineered immune cell in combination with the N-CAR; said CD123 specific chimeric antigen receptor (CAR) having one of the polypeptide structure selected from V1 to V6, preferably V1, V3 and V5 as illustrated in FIG. 1, said structure comprising an extra cellular ligand binding-domain comprising VH and VL from a monoclonal anti-CD123 antibody, a hinge, a transmembrane domain and a cytoplasmic domain including a CD3 zeta signaling domain and a co-stimulatory domain from 4-1BB.

[0814] According to a preferred embodiment, the isolated immune cell includes at least a N-CAR which comprises at least:
[0815] an extracellular binding domain, comprising a polypeptide sequence sharing more than 80%, preferably 90% and more preferably 95% identity with SEQ ID NO: XX (CD4 antigen), SEQ ID NO: XX (CD20 antigen), SEQ ID NO: XX (CD22 antigen), SEQ ID NO: XX (CD25 antigen) or SEQ ID NO: XX (MUC1 antigen);
[0816] an inhibitory transmembrane polypeptide having a polypeptide sequence of more than 80%, preferably 90% and more preferably 95% identity with SEQ ID NO: 33 (human TR10D), SEQ ID NO: 34 (human TR10A) and SEQ ID NO: 35 (human TR10B);

[0817] and a P-CAR which comprises in the engineered immune cell in combination with the N-CAR; said P-CAR comprising one transmembrane polypeptide comprising at least one extracellular ligand-binding domain able to bind to CD123 antigen, and one signal-transducing domain, optionally with a co-stimulatory domain.

[0818] According to a preferred embodiment, the isolated immune cell includes at least a N-CAR which comprises at least:
[0819] an extracellular binding domain, comprising a polypeptide sequence sharing more than 80%, preferably 90% and more preferably 95% identity with SEQ ID NO: XX (CD4 antigen), SEQ ID NO: XX (CD20 antigen), SEQ ID NO: XX (CD22 antigen), SEQ ID NO: XX (CD25 antigen) or SEQ ID NO: XX (MUC1 antigen);
[0820] an inhibitory transmembrane polypeptide having a polypeptide sequence of SEQ ID NO: 33 (human TR10D), SEQ ID NO: 34 (human TR10A) and SEQ ID NO: 35 (human TR10B).

[0821] and a P-CAR which comprises in the engineered immune cell in combination with the N-CAR; said P-CAR comprising one transmembrane polypeptide comprising at least one extracellular ligand-binding domain able to bind to CD123 antigen, and one signal-transducing domain, optionally with a co-stimulatory domain.

[0822] According to a more preferred embodiment, the isolated immune cell includes at least a N-CAR which comprises at least:
[0823] an extracellular binding domain, comprising a polypeptide sequence sharing more than 80%, preferably 90% and more preferably 95% identity with SEQ ID NO: XX (CD4 antigen), SEQ ID NO: XX (CD20 antigen), SEQ ID NO: XX (CD22 antigen), SEQ ID NO: XX (CD25 antigen) or SEQ ID NO: XX (MUC1 antigen)

[0824] and;
[0825] an inhibitory transmembrane polypeptide having a polypeptide sequence of more than 80%, preferably 90% and more preferably 95% identity with SEQ ID NO: 33 (human TR10D), SEQ ID NO: 34 (human TR10A) and SEQ ID NO: 35 (human TR10B);

[0826] and a CD123 specific chimeric antigen receptor (CAR) (as P-CAR) which comprises in the engineered immune cell in combination with the N-CAR; said CD123 specific chimeric antigen receptor (CAR) having one of the polypeptide structure selected from V1 to V6, preferably V1, V3 and V5 as illustrated in FIG. 1, said structure comprising an extra cellular ligand binding-domain comprising VH and VL from a monoclonal anti-CD123 antibody, a hinge, a transmembrane domain and a cytoplasmic domain including a CD3 zeta signaling domain and a co-stimulatory domain from 4-1BB.

[0827] Preferably, the above anti-CD123 CARs (P-CARs) having one of the polypeptide structure selected from V1, V3 and V5, as illustrated in FIG. 1, said structure comprising an extra cellular ligand binding-domain comprising VH and VL from a monoclonal anti-CD123 antibody, a hinge, a transmembrane domain, a cytoplasmic domain including a CD3 zeta signaling domain and a co-stimulatory domain from 4-1BB, said 123 CAR having at least 80% sequence identity with either SEQ ID NO. 42, SEQ ID NO. 44 or SEQ ID NO. 46.

[0828] According to an embodiment, the isolated immune cell includes at least a N-CAR which comprises at least:
[0829] an extracellular binding domain, comprising a polypeptide sequence sharing more than 80%, preferably 90% and more preferably 95% identity with SEQ ID NO: XX (CD56 antigen), SEQ ID NO: XX (CD205 antigen), SEQ ID NO: XX (CD83 antigen), SEQ ID NO: XX (CD206 antigen), SEQ ID NO: XX (CD200 antigen), or SEQ ID NO: 8 (CD36 antigen);

[0830] and;
[0831] an inhibitory transmembrane polypeptide having a sequence consisting essentially of amino acids No 201-375 from SEQ ID NO:8 (human KI2LA), amino acids No 206-348 from SEQ ID NO:2 (human KIR2DL1), amino acids No 206-348 from SEQ ID NO:1 (human KIR2DL2), amino acids No 206-341 from SEQ ID NO:4 (human KIR2DL3), amino acids No 206-348 from SEQ ID NO:2 (human KIR2DL1), amino acids No 203-377 from SEQ ID NO:6 (human KIR2DL4), amino acids No 301-444 from SEQ ID NO:7 (human KIR3DL1), amino acids No 301-455 from SEQ ID NO:5 (human KIR3DL2), amino acids No 204-310 from SEQ ID NO:24 (human FRGR2B), amino acids No 214-343 from SEQ ID NO:9 (human MILR1), amino acids No 216-448 from SEQ ID NO:10 (human LIRB4), amino acids No 420-631 from SEQ ID NO:11 (human LIRB3), amino acids No 296-410 from SEQ ID NO:12 (human KI3L3), amino acids No 419-590 from SEQ ID NO:15 (human LIRB5), amino acids No 420-598 from SEQ ID NO:16 (human LIRB2), amino acids No 375-515 from SEQ ID NO:18 (human FCRL4), amino acids No 753-977 from SEQ ID NO:23 (human FCRL5), amino acids No 388-508 from SEQ ID NO:24 (human FCRL2), amino acids No 292-429 from SEQ ID NO: 25 (human FCRL1), amino acids No 564-734 from SEQ ID NO:27 (human FCRL3), amino acids No 147-269 from SEQ ID NO:28 (human MPZL1), amino acids No 151-303 from SEQ ID NO:29 (human PILRA), amino acids No 329-417 from SEQ ID NO:30 (human PVR), amino acids No 229-325 from SEQ ID NO:36 (human CD200 receptor1), amino acids No 181-386 from SEQ ID NO:33 (human TR10D), amino acids No 230-468 from SEQ ID NO:34 (human TR10A) or amino acids No 179-440 from SEQ ID NO:35 (human TR10B);
[0832] and a CD123 specific chimeric antigen receptor (CAR) (as P-CAR) which comprises in the engineered immune cell in combination with the N-CAR; said CD123 specific chimeric antigen receptor (CAR) having one of the polypeptide structure selected from V1 to V6, preferably V1, V3 and V5 as illustrated in FIG. 1, said structure comprising an extra cellular ligand binding-domain comprising VH and VL from a monoclonal anti-CD123 antibody, a hinge, a transmembrane domain and a cytoplasmic domain including a CD3 zeta signaling domain and a co-stimulatory domain from 4-1BB.

[0833] According to an embodiment, the isolated immune cell includes at least a N-CAR which comprises at least:
[0834] an extracellular binding domain, which is able to bind to an “off-target” antigen on a healthy cell;

[0835] and;
[0836] an inhibitory transmembrane polypeptide having a sequence consisting essentially of amino acids No 201-375 from SEQ ID NO:8 (human KI2LA), amino acids No 206-348 from SEQ ID NO:2 (human KIR2DL1), amino acids No 206-348 from SEQ ID NO:1 (human KIR2DL2), amino acids No 206-341 from SEQ ID NO:4 (human KIR2DL3), amino acids No 206-348 from SEQ ID NO:2 (human KIR2DL1), amino acids No 203-377 from SEQ ID NO:6 (human KIR2DL4), amino acids No 301-444 from SEQ ID NO:7 (human KIR3DL1), amino acids No 301-455 from SEQ ID NO:5 (human KIR3DL2), amino acids No 204-310 from SEQ ID NO:24 (human FRGR2B), amino acids No 214-343 from SEQ ID NO:9 (human MILR1), amino acids No 216-448 from SEQ ID NO:10 (human LIRB4), amino acids No 420-631 from SEQ ID NO:11 (human LIRB3), amino acids No 296-410 from SEQ ID NO:12 (human KI3L3), amino acids No 419-590 from SEQ ID NO:15 (human LIRB5), amino acids No 420-598 from SEQ ID NO:16 (human LIRB2), amino acids No 375-515 from SEQ ID NO:18 (human FCRL4), amino acids No 753-977 from SEQ ID NO:23 (human FCRL5), amino acids No 388-508 from SEQ ID NO:24 (human FCRL2), amino acids No 292-429 from SEQ ID NO: 25 (human FCRL1), amino acids No 564-734 from SEQ ID NO:27 (human FCRL3), amino acids No 147-269 from SEQ ID NO:28 (human MPZL1), amino acids No 151-303 from SEQ ID NO:29 (human PILRA), amino acids No 329-417 from SEQ ID NO:30 (human PVR), amino acids No 229-325 from SEQ ID NO:36 (human CD200 receptor1), amino acids No 181-386 from SEQ ID NO:33 (human TR10D), amino acids No 230-468 from SEQ ID NO:34 (human TR10A) or amino acids No 179-440 from SEQ ID NO:35 (human TR10B);

[0837] and a CD38 specific chimeric antigen receptor (CAR) (as P-CAR) which comprises in the engineered immune cell in combination with the N-CAR; said CD38 specific chimeric antigen receptor (CAR) containing at least one transmembrane polypeptide which includes at least one extra-binding domain recognizing specifically the CD38 antigen, and an intracellular signaling domain, optionally with co-stimulatory domain.

[0838] According to an embodiment, the isolated immune cell includes at least a N-CAR which comprises at least:
[0839] an extracellular binding domain, which is able to bind to an “off-target” antigen on a healthy cell;

[0840] and;
[0841] an inhibitory transmembrane polypeptide having a sequence consisting essentially of amino acids No 201-375 from SEQ ID NO:8 (human KI2LA), amino acids No 206-348 from SEQ ID NO:2 (human KIR2DL1), amino acids No 206-348 from SEQ ID NO:1 (human KIR2DL2), amino acids No 206-341 from SEQ ID NO:4 (human KIR2DL3), amino acids No 206-348 from SEQ ID NO:2 (human KIR2DL1), amino acids No 203-377 from SEQ ID NO:6 (human KIR2DL4), amino acids No 301-444 from SEQ ID NO:7 (human KIR3DL1), amino acids No 301-455 from SEQ ID NO:5 (human KIR3DL2), amino acids No 204-310 from SEQ ID NO:24 (human FRGR2B), amino acids No 214-343 from SEQ ID NO:9 (human MILR1), amino acids No 216-448 from SEQ ID NO:10 (human LIRB4), amino acids No 420-631 from SEQ ID NO:11 (human LIRB3), amino acids No 296-410 from SEQ ID NO:12 (human KI3L3), amino acids No 419-590 from SEQ ID NO:15 (human LIRB5), amino acids No 420-598 from SEQ ID NO:16 (human LIRB2), amino acids No 375-515 from SEQ ID NO:18 (human FCRL4), amino acids No 753-977 from SEQ ID NO:23 (human FCRL5), amino acids No 388-508 from SEQ ID NO:24 (human FCRL2), amino acids No 292-429 from SEQ ID NO: 25 (human FCRL1), amino acids No 564-734 from SEQ ID NO:27 (human FCRL3), amino acids No 147-269 from SEQ ID NO:28 (human MPZL1), amino acids No 151-303 from SEQ ID NO:29 (human PILRA), amino acids No 329-417 from SEQ ID NO:30 (human PVR), amino acids No 229-325 from SEQ ID NO:36 (human CD200 receptor1), amino acids No 181-386 from SEQ ID NO:33 (human TR10D), amino acids No 230-468 from SEQ ID NO:34 (human TR10A) or amino acids No 179-440 from SEQ ID NO:35 (human TR10B);

[0842] and a CD38 specific chimeric antigen receptor (CAR) (as P-CAR) which comprises in the engineered immune cell in combination with the N-CAR; said CD38 specific chimeric antigen receptor (CAR) containing at least one transmembrane polypeptide which includes at least one extra-binding domain recognizing specifically the CD38 antigen, and an intracellular signaling domain, optionally with co-stimulatory domain.

[0843] According to a preferred embodiment, the isolated immune cell includes at least a N-CAR which comprises at least:
[0844] an extracellular binding domain, which is able to bind to an “off-target” antigen on a healthy or immune cell;
[0845] an inhibitory transmembrane polypeptide having a sequence consisting essentially of amino acids No 201-375 from SEQ ID NO:8 (human KI2LA), amino acids No 206-348 from SEQ ID NO:2 (human KIR2DL1), amino acids No 206-348 from SEQ ID NO:1 (human KIR2DL2), amino acids No 206-341 from SEQ ID NO:4 (human KIR2DL3), amino acids No 206-348 from SEQ ID NO:2 (human KIR2DL1), amino acids No 203-377 from SEQ ID NO:6 (human KIR2DL4), amino acids No 301-444 from SEQ ID NO:7 (human KIR3DL1), amino acids No 301-455 from SEQ ID NO:5 (human KIR3DL2), amino acids No 204-310 from SEQ ID NO:24 (human FRGR2B), amino acids No 214-343 from SEQ ID NO:9 (human MILR1), amino acids No 216-448 from SEQ ID NO:10 (human LIRB4), amino acids No 420-631 from SEQ ID NO:11 (human LIRB3), amino acids No 296-410 from SEQ ID NO:12 (human KI3L3), amino acids No 419-590 from SEQ ID NO:15 (human LIRB5), amino acids No 420-598 from SEQ ID NO:16 (human LIRB2), amino acids No 375-515 from SEQ ID NO:18 (human FCRL4), amino acids No 753-977 from SEQ ID NO:23 (human FCRL5), amino acids No 388-508 from SEQ ID NO:24 (human FCRL2), amino acids No 292-429 from SEQ ID NO: 25 (human FCRL1), amino acids No 564-734 from SEQ ID NO:27 (human FCRL3), amino acids No 147-269 from SEQ ID NO:28 (human MPZL1), amino acids No 151-303 from SEQ ID NO:29 (human PILRA), amino acids No 329-417 from SEQ ID NO:30 (human PVR), amino acids No 229-325 from SEQ ID NO:36 (human CD200 receptor1), amino acids No 181-386 from SEQ ID NO:33 (human TR10D), amino acids No 230-468 from SEQ ID NO:34 (human TR10A) or amino acids No 179-440 from SEQ ID NO:35 (human TR10B);

[0846] and a CD19 specific chimeric antigen receptor (CAR) (as P-CAR) which comprises in the engineered immune cell in combination with the N-CAR; said CD19 specific chimeric antigen receptor (CAR) having one of the polypeptide structure selected from V1 to V6, preferably V1, V3 and V5 as illustrated in FIG. 1, said structure comprising an extra cellular ligand binding-domain comprising VH and VL from a monoclonal anti-CD19 antibody, a hinge, a transmembrane domain and a cytoplasmic domain including a CD3 zeta signaling domain and a co-stimulatory domain from 4-1BB.

[0847] According to a preferred embodiment, the isolated immune cell includes at least a N-CAR which comprises at least:
[0848] an extracellular binding domain, which is able to bind to an “off-target” antigen on a healthy cell;

[0849] and;
[0850] an inhibitory transmembrane polypeptide having a sequence consisting essentially of amino acids No 201-375 from SEQ ID NO:8 (human KI2LA), amino acids No 206-348 from SEQ ID NO:2 (human KIR2DL1), amino acids No 206-348 from SEQ ID NO:1 (human KIR2DL2), amino acids No 206-341 from SEQ ID NO:4 (human KIR2DL3), amino acids No 206-348 from SEQ ID NO:2 (human KIR2DL1), amino acids No 203-377 from SEQ ID NO:6 (human KIR2DL4), amino acids No 301-444 from SEQ ID NO:7 (human KIR3DL1), amino acids No 301-455 from SEQ ID NO:5 (human KIR3DL2), amino acids No 204-310 from SEQ ID NO:24 (human FRGR2B), amino acids No 214-343 from SEQ ID NO:9 (human MILR1), amino acids No 216-448 from SEQ ID NO:10 (human LIRB4), amino acids No 420-631 from SEQ ID NO:11 (human LIRB3), amino acids No 296-410 from SEQ ID NO:12 (human KI3L3), amino acids No 419-590 from SEQ ID NO:15 (human LIRB5), amino acids No 420-598 from SEQ ID NO:16 (human LIRB2), amino acids No 375-515 from SEQ ID NO:18 (human FCRL4), amino acids No 753-977 from SEQ ID NO:23 (human FCRL5), amino acids No 388-508 from SEQ ID NO:24 (human FCRL2), amino acids No 292-429 from SEQ ID NO: 25 (human FCRL1), amino acids No 564-734 from SEQ ID NO:27 (human FCRL3), amino acids No 147-269 from SEQ ID NO:28 (human MPZL1), amino acids No 151-303 from SEQ ID NO:29 (human PILRA), amino acids No 329-417 from SEQ ID NO:30 (human PVR), amino acids No 229-325 from SEQ ID NO:36 (human CD200 receptor1), amino acids No 181-386 from SEQ ID NO:33 (human TR10D), amino acids No 230-468 from SEQ ID NO:34 (human TR10A) or amino acids No 179-440 from SEQ ID NO:35 (human TR10B);

[0851] and a CD19 specific chimeric antigen receptor (CAR) (as P-CAR) which comprises in the engineered immune cell in combination with the N-CAR; said CD19 specific chimeric antigen receptor (CAR) having one of the polypeptide structure selected from V1 to V6, preferably V1, V3 and V5 as illustrated in FIG. 1, said structure comprising an extra cellular ligand binding-domain comprising VH and VL from a monoclonal anti-CD19 antibody, a hinge, a transmembrane domain and a cytoplasmic domain including a CD3 zeta signaling domain and a co-stimulatory domain from 4-1BB.

[0852] According to a preferred embodiment, the isolated immune cell includes at least a N-CAR which comprises at least:
[0853] an extracellular binding domain, which is able to bind to an “off-target” antigen on a healthy cell;

[0854] and;
[0855] an inhibitory transmembrane polypeptide having a polypeptide sequence of more than 80%, preferably 90% and more preferably 95% identity with SEQ ID NO: 33 (human TR10D), SEQ ID NO: 34 (human TR10A) and SEQ ID NO: 35 (human TR10B);

[0856] and a CD19 specific chimeric antigen receptor (CAR) (as P-CAR) which comprises in the engineered immune cell in combination with the N-CAR; said CD19 specific chimeric antigen receptor (CAR) having one of the polypeptide structure selected from V1 to V6, preferably V1, V3 and V5 as illustrated in FIG. 1, said structure comprising an extra cellular ligand binding-domain comprising VH and VL from a monoclonal anti-CD38 antibody, a hinge, a transmembrane domain and a cytoplasmic domain including a CD3 zeta signaling domain and a co-stimulatory domain from 4-1BB.

[0857] According to an embodiment, the isolated immune cell includes at least a N-CAR which comprises at least:
[0858] an extracellular binding domain, which is able to bind to an “off-target” antigen on a healthy cell;

[0859] and;
[0860] an inhibitory transmembrane polypeptide having a sequence consisting essentially of amino acids No 201-375 from SEQ ID NO:8 (human KI2LA), amino acids No 206-348 from SEQ ID NO:2 (human KIR2DL1), amino acids No 206-348 from SEQ ID NO:1 (human KIR2DL2), amino acids No 206-341 from SEQ ID NO:4 (human KIR2DL3), amino acids No 206-348 from SEQ ID NO:2 (human KIR2DL1), amino acids No 203-377 from SEQ ID NO:6 (human KIR2DL4), amino acids No 301-444 from SEQ ID NO:7 (human KIR3DL1), amino acids No 301-455 from SEQ ID NO:5 (human KIR3DL2), amino acids No 204-310 from SEQ ID NO:24 (human FRGR2B), amino acids No 214-343 from SEQ ID NO:9 (human MILR1), amino acids No 216-448 from SEQ ID NO:10 (human LIRB4), amino acids No 420-631 from SEQ ID NO:11 (human LIRB3), amino acids No 296-410 from SEQ ID NO:12 (human KI3L3), amino acids No 419-590 from SEQ ID NO:15 (human LIRB5), amino acids No 420-598 from SEQ ID NO:16 (human LIRB2), amino acids No 375-515 from SEQ ID NO:18 (human FCRL4), amino acids No 753-977 from SEQ ID NO:23 (human FCRL5), amino acids No 388-508 from SEQ ID NO:24 (human FCRL2), amino acids No 292-429 from SEQ ID NO: 25 (human FCRL1), amino acids No 564-734 from SEQ ID NO:27 (human FCRL3), amino acids No 147-269 from SEQ ID NO:28 (human MPZL1), amino acids No 151-303 from SEQ ID NO:29 (human PILRA), amino acids No 329-417 from SEQ ID NO:30 (human PVR), amino acids No 229-325 from SEQ ID NO:36 (human CD200 receptor1), amino acids No 181-386 from SEQ ID NO:33 (human TR10D), amino acids No 230-468 from SEQ ID NO:34 (human TR10A) or amino acids No 179-440 from SEQ ID NO:35 (human TR10B);

[0861] and a CD19 specific chimeric antigen receptor (CAR) (as P-CAR) which comprises in the engineered immune cell in combination with the N-CAR; said CD19 specific chimeric antigen receptor (CAR) containing at least one transmembrane polypeptide which includes at least one extra-binding domain recognizing specifically the CD19 antigen, and an intracellular signaling domain, optionally with co-stimulatory domain.

[0862] According to a preferred embodiment, the isolated immune cell includes at least a N-CAR which comprises at least:

[0863] an extracellular binding domain, which is able to bind to an “off-target” antigen on a healthy cell;

[0864] and;
[0865] an inhibitory transmembrane polypeptide having a sequence consisting essentially of amino acids No 201-375 from SEQ ID NO:8 (human KI2LA), amino acids No 206-348 from SEQ ID NO:2 (human KIR2DL1), amino acids No 206-348 from SEQ ID NO:1 (human KIR2DL2), amino acids No 206-341 from SEQ ID NO:4 (human KIR2DL3), amino acids No 206-348 from SEQ ID NO:2 (human KIR2DL1), amino acids No 203-377 from SEQ ID NO:6 (human KIR2DL4), amino acids No 301-444 from SEQ ID NO:7 (human KIR3DL1), amino acids No 301-455 from SEQ ID NO:5 (human KIR3DL2), amino acids No 204-310 from SEQ ID NO:24 (human FRGR2B), amino acids No 214-343 from SEQ ID NO:9 (human MILR1), amino acids No 216-448 from SEQ ID NO:10 (human LIRB4), amino acids No 420-631 from SEQ ID NO:11 (human LIRB3), amino acids No 296-410 from SEQ ID NO:12 (human KI3L3), amino acids No 419-590 from SEQ ID NO:15 (human LIRB5), amino acids No 420-598 from SEQ ID NO:16 (human LIRB2), amino acids No 375-515 from SEQ ID NO:18 (human FCRL4), amino acids No 753-977 from SEQ ID NO:23 (human FCRL5), amino acids No 388-508 from SEQ ID NO:24 (human FCRL2), amino acids No 292-429 from SEQ ID NO: 25 (human FCRL1), amino acids No 564-734 from SEQ ID NO:27 (human FCRL3), amino acids No 147-269 from SEQ ID NO:28 (human MPZL1), amino acids No 151-303 from SEQ ID NO:29 (human PILRA), amino acids No 329-417 from SEQ ID NO:30 (human PVR), amino acids No 229-325 from SEQ ID NO:36 (human CD200 receptor1), amino acids No 181-386 from SEQ ID NO:33 (human TR10D), amino acids No 230-468 from SEQ ID NO:34 (human TR10A) or amino acids No 179-440 from SEQ ID NO:35 (human TR10B);

[0866] and a CD19 specific chimeric antigen receptor (CAR) (as P-CAR) which comprises in the engineered immune cell in combination with the N-CAR; said CD19 specific chimeric antigen receptor (CAR) having one of the polypeptide structure selected from V1 to V6, preferably V1, V3 and V5 as illustrated in FIG. 1, said structure comprising an extra cellular ligand binding-domain comprising VH and VL from a monoclonal anti-CD19 antibody, a hinge, a transmembrane domain and a cytoplasmic domain including a CD3 zeta signaling domain and a co-stimulatory domain from 4-1BB.

[0867] According to a preferred embodiment, the isolated immune cell includes at least a N-CAR which comprises at least:
[0868] an extracellular binding domain, which is able to bind to an “off-target” antigen on a healthy cell;

[0869] and;
[0870] an inhibitory transmembrane polypeptide having a sequence consisting essentially of amino acids No 201-375 from SEQ ID NO:8 (human KI2LA), amino acids No 206-348 from SEQ ID NO:2 (human KIR2DL1), amino acids No 206-348 from SEQ ID NO:1 (human KIR2DL2), amino acids No 206-341 from SEQ ID NO:4 (human KIR2DL3), amino acids No 206-348 from SEQ ID NO:2 (human KIR2DL1), amino acids No 203-377 from SEQ ID NO:6 (human KIR2DL4), amino acids No 301-444 from SEQ ID NO:7 (human KIR3DL1), amino acids No 301-455 from SEQ ID NO:5 (human KIR3DL2), amino acids No 204-310 from SEQ ID NO:24 (human FRGR2B), amino acids No 214-343 from SEQ ID NO:9 (human MILR1), amino acids No 216-448 from SEQ ID NO:10 (human LIRB4), amino acids No 420-631 from SEQ ID NO:11 (human LIRB3), amino acids No 296-410 from SEQ ID NO:12 (human KI3L3), amino acids No 419-590 from SEQ ID NO:15 (human LIRB5), amino acids No 420-598 from SEQ ID NO:16 (human LIRB2), amino acids No 375-515 from SEQ ID NO:18 (human FCRL4), amino acids No 753-977 from SEQ ID NO:23 (human FCRL5), amino acids No 388-508 from SEQ ID NO:24 (human FCRL2), amino acids No 292-429 from SEQ ID NO: 25 (human FCRL1), amino acids No 564-734 from SEQ ID NO:27 (human FCRL3), amino acids No 147-269 from SEQ ID NO:28 (human MPZL1), amino acids No 151-303 from SEQ ID NO:29 (human PILRA), amino acids No 329-417 from SEQ ID NO:30 (human PVR), amino acids No 229-325 from SEQ ID NO:36 (human CD200 receptor1), amino acids No 181-386 from SEQ ID NO:33 (human TR10D), amino acids No 230-468 from SEQ ID NO:34 (human TR10A) or amino acids No 179-440 from SEQ ID NO:35 (human TR10B);

[0871] and a CD19 specific chimeric antigen receptor (CAR) (as P-CAR) which comprises in the engineered immune cell in combination with the N-CAR; said CD19 specific chimeric antigen receptor (CAR) having one of the polypeptide structure selected from V1 to V6, preferably V1, V3 and V5 as illustrated in FIG. 1, said structure comprising an extra cellular ligand binding-domain comprising VH and VL from a monoclonal anti-CD19 antibody, a hinge, a transmembrane domain and a cytoplasmic domain including a CD3 zeta signaling domain and a co-stimulatory domain from 4-1BB.

[0872] According to a preferred embodiment, the isolated immune cell includes at least a N-CAR which comprises at least:
[0873] an extracellular binding domain, which is able to bind to an “off-target” antigen on a healthy cell;

[0874] and;
[0875] an inhibitory transmembrane polypeptide having a polypeptide sequence of more than 80%, preferably 90% and more preferably 95% identity with SEQ ID NO: 33 (human TR10D), SEQ ID NO: 34 (human TR10A) and SEQ ID NO: 35 (human TR10B);

[0876] and a CD19 specific chimeric antigen receptor (CAR) (as P-CAR) which comprises in the engineered immune cell in combination with the N-CAR; said CD19 specific chimeric antigen receptor (CAR) having one of the polypeptide structure selected from V1 to V6, preferably V1, V3 and V5 as illustrated in FIG. 1, said structure comprising an extra cellular ligand binding-domain comprising VH and VL from a monoclonal anti-CD19 antibody, a hinge, a transmembrane domain and a cytoplasmic domain including a CD3 zeta signaling domain and a co-stimulatory domain from 4-1BB.

[0877] Said immune cell engineered to express both the N-CAR and the P-CAR such as presented previously is intended to be used as a medicament.

[0878] Preferably, such engineered immune cell is intended to be used for the treatment of cancer.

[0879] More preferably, such engineered immune cell is intended to be used for the treatment of refractory relapsed cancer.

[0880] By “relapsed cancer”, it is referred to a cancer that returns after a period of improvement. This applies whether the cancer was treated or untreated.

[0881] By “refractory cancer”, it is referred to a cancer that proves resistant, or does not respond to, treatment, regardless whether the cancer is resistant to treatment immediately, or it develops a resistance during treatment.

[0882] Methods of Engineering Immune Cells

[0883] The inventors developed methods of engineering such immune cells based on the rational combination of regulatory modules in artificial circuits for performing tasks based on “NOT gates”. The term “gate” is used to refer to a device or molecular mechanism that produces a particular (predetermined) output in response to two or more input signals. According to the present invention, the logical NOT gate refers to the immune cell inhibition, in particular T cell cytotoxicity against a target cell through inhibition of specific proteins (signaling proteins) resulting from the concomitant binding to 2 different antigens.

[0884] In one embodiment, the method of engineering an immune can comprise the steps of:

[0885] (a) Providing an immune cell;

[0886] (b) Expressing the N-CAR and the P-CAR at the surface of said cell.

[0887] In another embodiment, the method of engineering an immune cell can comprise the steps of:

[0888] a. Introducing into said cell at least one polynucleotide encoding the N-CAR and at least one polynucleotide encoding the CAR;

[0889] b. Expressing said polynucleotides into said cell.

[0890] P-CARs and immune cells comprising them have been extensively disclosed and can be prepared by the skilled person according to known methods. For example, a methodology to prepare P-CAR and cells comprising such P-CARs is disclosed in U.S. Pat. No. 7,446,190, WO2008/121420, U.S. Pat. No. 8,252,592, US20140024809, WO2012/079000, WO2014153270, WO2012/099973, WO2014/011988, WO2014/011987, WO2013/067492, WO2013/070468, WO2013/040557, WO2013/126712, WO2013/126729, WO 2013/126726, WO2013/126733, U.S. Pat. No. 8,399,645, US20130266551, US20140023674, WO2014039523, U.S. Pat. No. 7,514,537, U.S. Pat. No. 8,324,353, WO2010/025177, U.S. Pat. No. 7,446,179, WO2010/025177, WO2012/031744, WO2012/136231A1, WO2012/050374A2, WO2013074916, WO2009/091826A3, WO2013/176915 or WO/2013/059593 which are all incorporated herein in their entirety by reference. Immune cells comprising a P-CAR and a N-CAR can be prepared by the skilled person according to the methodologies disclosed in the above mentioned references. In a preferred embodiment, immune cells comprising a P-CAR and a N-CAR can be prepared by the skilled person according to the methodology disclosed in WO2013/176915.

[0891] In one embodiment, the method of engineering T-cells of invention can comprise:
[0892] (a) Providing a T-cell, preferably from a cell culture or from a blood sample;
[0893] (b) Transforming said T cell with a nucleic acid encoding a rare-cutting endonuclease able to

[0894] Selectively inactivate by DNA cleavage, preferably by double-strand break respectively at least one gene encoding a component of the T-cell receptor (TCR);
[0895] (d) Expressing said rare-cutting endonucleases into said T-cells;
[0896] (e) Sorting the transformed T-cells, which do not express TCR on their cell surface;

[0897] In some embodiments, the method of engineering T-cells of invention can comprise:
[0898] (a) Providing a T-cell, preferably from a cell culture or from a blood sample;
[0899] (b) Selecting a gene in said T-cell expressing a target for an immunosuppressive agent;
[0900] (c) Transforming said T cell with nucleic acid encoding a rare-cutting endonuclease able to selectively inactivate by DNA cleavage, preferably by double-strand break respectively:
[0901] said gene encoding a target for said immunosuppressive agent, and
[0902] at least one gene encoding a component of the T-cell receptor (TCR);
[0903] (d) Expressing said rare-cutting endonucleases into said T-cells;
[0904] (e) Sorting the transformed T-cells, which do not express TCR on their cell surface;
[0905] (f) Expanding said cells, optionally in presence of said immunosuppressive agent.

[0906] Such inactivation of TCR gene may be performed such as described in the Example 1 of the application WO2014/184143.

[0907] In some embodiment, the method to engineer A cell of the invention further comprises one or more additional genomic modification step. By additional genomic modification step, can be intended the introduction into cells to engineer of one or more protein of interest. Said protein of interest can be a P-CAR and/or an N-CAR.

[0908] By “Immunosuppressive agents” or “immunosuppressive agents”, it is meant drugs that inhibit or prevent activity of the immune system.

[0909] In some embodiments, the method of engineering T-cells of invention can comprise:
[0910] (a) modifying T-cells by inactivating at least:
   [0911] a first gene expressing a target for an immunosuppressive agent, and
   [0912] a second gene encoding a component of the T-cell receptor (TCR)
[0913] (b) expanding said cells, optionally in presence of said immunosuppressive agent.

[0914] An immunosuppressive agent is an agent that suppresses immune function by one of several mechanisms of action. In other words, an immunosuppressive agent is a role played by a compound which is exhibited by a capability to diminish the extent and/or voracity of an immune response. As non-limiting example, an immunosuppressive agent can be a calcineurin inhibitor, a target of rapamycin, an interleukin-2 u-chain blocker, an inhibitor of inosine monophosphate dehydrogenase, an inhibitor of dihydrofolic acid reductase, a corticosteroid or an immunosuppressive antimetabolite.

[0915] In a particular embodiment, the genetic modification step of the method relies on the inactivation of one gene selected from the group consisting of CD52, GR, TCR alpha and TCR beta. In another embodiment, the genetic modification step of the method relies on the inactivation of two genes selected from the group consisting of dCK, CD52 and GR, CD52 and TCR alpha, CDR52 and TCR beta, GR and TCR alpha, GR and TCR beta, TCR alpha and TCR beta. In another embodiment, the genetic modification step of the method relies on the inactivation of more than two genes. The genetic modification is preferably operated ex-vivo.

[0916] Inactivation of CD52, CTLA-4 and/or PD-1 genes, for instance by TALE-nuclease, may be performed such as described respectively in Examples 2, 3 and 4 in the application WO2014/184744.

[0917] The rare-cutting endonucleases used for inactivating the genes in T-cells are preferably Transcription Activator like Effector (TALE), but may be also a Cas9 coupled to a RNA guide as respectively described in WO 2013/176915 and WO 2014/191128.

[0918] Compositions/Formulations

[0919] Another aspect of the present invention relates to compositions or formulations containing genetically engineered immune cells which express at least one N-CAR and at least one P-CAR such as described above and at least one pharmaceutically acceptable carrier or vehicle.

[0920] Compositions of the invention comprising genetically modified immune cells can be conveniently provided as sterile liquid preparations, e.g., isotonic aqueous solutions, suspensions, emulsions, dispersions, or viscous compositions, which may be buffered to a selected pH. Liquid preparations are normally easier to prepare than gels, other viscous compositions, and solid compositions. Additionally, liquid compositions are somewhat more convenient to administer, especially by injection. Viscous compositions, on the other hand, can be formulated within the appropriate viscosity range to provide longer contact periods with specific tissues. Liquid or viscous compositions can comprise carriers, which can be a solvent or dispersing medium containing, for example, water, saline, phosphate buffered saline, polyol (for example, glycerol, propylene glycol, liquid polyethylene glycol, and the like) and suitable mixtures thereof.

[0921] Sterile injectable solutions can be prepared by incorporating the genetically modified immunoresponsive cells utilized in practicing the present invention in the required amount of the appropriate solvent with various amounts of the other ingredients, as desired. Such compositions may be in admixture with a suitable carrier, diluent, or excipient such as sterile water, physiological saline, glucose, dextrose, or the like. The compositions can also be lyophilized. The compositions can contain auxiliary substances such as wetting, dispersing, or emulsifying agents (e.g., methylcellulose), pH buffering agents, gelling or viscosity enhancing additives, preservatives, flavoring agents, colors, and the like, depending upon the route of administration and the preparation desired. Standard texts, such as “REMINGTON'S PHARMACEUTICAL SCIENCE”, 17th edition, 1985, incorporated herein by reference, may be consulted to prepare suitable preparations, without undue experimentation.

[0922] Various additives which enhance the stability and sterility of the compositions, including antimicrobial preservatives, antioxidants, chelating agents, and buffers, can be added. Prevention of the action of microorganisms can be ensured by various antibacterial and antifungal agents, for example, parabens, chlorobutanol, phenol, sorbic acid, and the like. Prolonged absorption of the injectable pharmaceutical form can be brought about by the use of agents delaying absorption, for example, aluminium monostearate and gelatin. According to the present invention, however, any vehicle, diluent, or additive used would have to be compatible with the genetically modified immunoresponsive cells or their progenitors.

[0923] The compositions can be isotonic, i.e., they can have the same osmotic pressure as blood and lacrimal fluid. The desired isotonicity of the compositions of this invention may be accomplished using sodium chloride, or other pharmaceutically acceptable agents such as dextrose, boric acid, sodium tartrate, propylene glycol or other inorganic or organic solutes. Sodium chloride is preferred particularly for buffers containing sodium ions.

[0924] Viscosity of the compositions, if desired, can be maintained at the selected level using a pharmaceutically acceptable thickening agent. Methylcellulose is preferred because it is readily and economically available and is easy to work with. Other suitable thickening agents include, for example, xanthan gum, carboxymethyl cellulose, hydroxypropyl cellulose, carbomer, and the like. The preferred concentration of the thickener will depend upon the agent selected. The important point is to use an amount that will achieve the selected viscosity. Obviously, the choice of suitable carriers and other additives will depend on the exact route of administration and the nature of the particular dosage form, e.g., liquid dosage form (e.g., whether the composition is to be formulated into a solution, a suspension, gel or another liquid form, such as a time release form or liquid-filled form).

[0925] Those skilled in the art will recognize that the components of the compositions should be selected to be chemically inert and will not affect the viability or efficacy of the genetically modified immunoresponsive cells as described in the present invention. This will present no problem to those skilled in chemical and pharmaceutical principles, or problems can be readily avoided by reference to standard texts or by simple experiments (not involving undue experimentation), from this disclosure and the documents cited herein.

[0926] The skilled artisan can readily determine the amount of cells and optional additives, vehicles, and/or carrier in compositions and to be administered in methods of the invention. Typically, any additives (in addition to the active cell(s) and/or agent(s)) are present in an amount of 0.001 to 50% (weight) solution in phosphate buffered saline, and the active ingredient is present in the order of micrograms to milligrams, such as about 0.0001 to about 5 wt %, preferably about 0.0001 to about 1 wt %, still more preferably about 0.0001 to about 0.05 wt % or about 0.001 to about 20 wt %, preferably about 0.01 to about 10 wt %, and still more preferably about 0.05 to about 5 wt %. Of course, for any composition to be administered to an animal or human, and for any particular method of administration, it is preferred to determine therefore: toxicity, such as by determining the lethal dose (LD) and LD50 in a suitable animal model e.g., rodent such as mouse; and, the dosage of the composition(s), concentration of components therein and timing of administering the composition(s), which elicit a suitable response. Such determinations do not require undue experimentation from the knowledge of the skilled artisan, this disclosure and the documents cited herein. And, the time for sequential administrations can be ascertained without undue experimentation.

[0927] Delivery Methods

[0928] The different methods described above involve expressing N-CAR and P-CAR at the surface of a cell. As non-limiting example, said N-CAR and P-CAR can be expressed by introducing the latter into a cell. CARs can be introduced as transgene encoded by one plasmidic vector. Said plasmid vector can also contain a selection marker which provides for identification and/or selection of cells which received said vector.

[0929] Polypeptides may be synthesized in situ in the cell as a result of the introduction of polynucleotides encoding said polypeptides into the cell. Alternatively, said polypeptides could be produced outside the cell and then introduced thereto. Methods for introducing a polynucleotide construct into cells are known in the art and including as non-limiting examples stable transformation methods wherein the polynucleotide construct is integrated into the genome of the cell, transient transformation methods wherein the polynucleotide construct is not integrated into the genome of the cell and virus mediated methods. Said polynucleotides may be introduced into a cell by for example, recombinant viral vectors (e.g. retroviruses, adenoviruses), liposome and the like. For example, transient transformation methods include for example microinjection, electroporation or particle bombardment. Said polynucleotides may be included in vectors, more particularly plasmids or virus, in view of being expressed in cells.

[0930] Polynucleotides and Vectors

[0931] In one embodiment, said isolated cell according to the present invention comprises a polynucleotide encoding the “NOT gate” receptor (N-CAR & P-CAR).

[0932] The present invention also relates to polynucleotides, vectors encoding the above described N-CAR and P-CAR according to the invention.

[0933] The polynucleotide may consist in an expression cassette or expression vector (e.g. a plasmid for introduction into a bacterial host cell, or a viral vector such as a baculovirus vector for transfection of an insect host cell, or a plasmid or viral vector such as a lentivirus for transfection of a mammalian host cell).

[0934] In a particular embodiment, the different nucleic acid sequences can be included in one polynucleotide or vector which comprises a nucleic acid sequence encoding ribosomal skip sequence such as a sequence encoding a 2A peptide. 2A peptides, which were identified in the Aphthovirus subgroup of picornaviruses, causes a ribosomal “skip” from one codon to the next without the formation of a peptide bond between the two amino acids encoded by the codons (see (Doronina, Wu et al. 2008, Mol Cell Biol 28(13):4227-39). By “codon” is meant three nucleotides on an mRNA (or on the sense strand of a DNA molecule) that are translated by a ribosome into one amino acid residue. Thus, two polypeptides can be synthesized from a single, contiguous open reading frame within an mRNA when the polypeptides are separated by a 2A oligopeptide sequence that is in frame. Such ribosomal skip mechanisms are well known in the art and are known to be used by several vectors for the expression of several proteins encoded by a single messenger RNA.

[0935] To direct, transmembrane polypeptide into the secretory pathway of a host cell, a secretory signal sequence (also known as a leader sequence, prepro sequence or pre sequence) is provided in polynucleotide sequence or vector sequence. The secretory signal sequence is operably linked to the transmembrane nucleic acid sequence, i.e., the two sequences are joined in the correct reading frame and positioned to direct the newly synthesized polypeptide into the secretory pathway of the host cell. Secretory signal sequences are commonly positioned 5′ to the nucleic acid sequence encoding the polypeptide of interest, although certain secretory signal sequences may be positioned elsewhere in the nucleic acid sequence of interest (see, e.g., Welch et al., U.S. Pat. No. 5,037,743; Holland et al., U.S. Pat. No. 5,143,830).

[0936] Those skilled in the art will recognize that, in view of the degeneracy of the genetic code, considerable sequence variation is possible among these polynucleotide molecules. Preferably, the nucleic acid sequences of the present invention are codon-optimized for expression in mammalian cells, preferably for expression in human cells. Codon-optimization refers to the exchange in a sequence of interest of codons that are generally rare in highly expressed genes of a given species by codons that are generally frequent in highly expressed genes of such species, such codons encoding the amino acids as the codons that are being exchanged.

[0937] Therapeutic Applications

[0938] In another embodiment, isolated cell expressing both at least one N-CAR and at least one P-CAR obtained by the different methods or cell line derived from said isolated cell as previously described can be used as a medicament.

[0939] In another embodiment, said medicament can be used for treating cancer in a patient in need thereof.

[0940] In another embodiment, said isolated cell according to the invention or cell line derived from said isolated cell can be used in the manufacture of a medicament for treatment of a cancer in a patient in need thereof.

[0941] In another embodiment, said engineered cell expressing both at least one N-CAR and at least one P-CAR is intended for its use in therapy, wherein the condition is a haematological cancer condition. In particular, such haematological cancer condition is leukemia.

[0942] More specifically, such engineered cell is intended for its use in therapy, wherein said leukemia is selected from the group consisting of acute myelogenous leukemia (AML), chronic myelogenous leukemia, melodysplastic syndrome, acute lymphoid leukemia, chronic lymphoid leukemia (CLL), and myelodysplastic syndrome.

[0943] In a preferred embodiment, said engineered cell is intended to be used in therapy, wherein the condition is a pre-malignant or malignant cancer condition characterized by CD123-expressing cells. In particular, such condition is characterized by an overabundance of CD123-expressing cells.

[0944] In a particular embodiment, such engineered cell is intended for its use in therapy, wherein the leukemia is acute myelogenous leukemia (AML). Therefore, this is particularly adapted for treating the pre-malignant or malignant cancer AML condition characterized especially by CD123-expressing cells or by CLL-1 expressing cells.

[0945] In a preferred embodiment, said engineered cell is intended to be used in therapy, wherein the condition is a pre-malignant or malignant cancer condition such as multiple myeloma (MM) characterized especially by CD38-expressing cells.

[0946] In another particular embodiment, such engineered cell is intended for its use in therapy, wherein the leukemia is chronic lymphocytic leukemia (CLL). Therefore, this is particularly adapted for treating the pre-malignant or malignant cancer CLL condition characterized especially by CS1-expressing cells.

[0947] In another particular embodiment, said engineered cell is intended to be used in therapy, wherein the condition is a pre-malignant or malignant cancer CLL condition characterized by ROR1-expressing cells.

[0948] In another embodiment, said engineered cell for use in therapy, wherein said malignant lymphoproliferative disorder is lymphoma. More specifically, such engineered cell may be used to treat lymphoma is selected from the group consisting of multiple myeloma, non-Hodgkin's lymphoma, Burkitt's lymphoma, and follicular lymphoma (small cell and large cell).

[0949] In another particular embodiment, said engineered cell is intended to be used in therapy, wherein the condition is a solid tumor such as breast, colon, lung, or kidney tumor characterized especially by ROR1-expressing cells.

[0950] In a preferred embodiment, said engineered cell is intended to be used in therapy, wherein the condition is a pre-malignant or malignant cancer condition characterized by CD22-expressing cells.

[0951] In another aspect, the present invention relies on methods for treating patients in need thereof, said method comprising at least one of the following steps:

[0952] (a) providing an immune-cell obtainable by any one of the methods previously described;

[0953] (b) Administrating said transformed immune cells to said patient,

[0954] On one embodiment, said T cells of the invention can undergo robust in vivo T cell expansion and can persist for an extended amount of time.

[0955] Said treatment can be ameliorating, curative or prophylactic. It may be either part of an autologous immunotherapy or part of an allogenic immunotherapy treatment. By autologous, it is meant that cells, cell line or population of cells used for treating patients are originating from said patient or from a Human Leucocyte Antigen (HLA) compatible donor. By allogeneic is meant that the cells or population of cells used for treating patients are not originating from said patient but from a donor.

[0956] Cells that can be used with the disclosed methods such as TALE nuclease.

[0957] Said treatment can be used to treat patients diagnosed with cancer, viral infection, autoimmune disorders or Graft versus Host Disease (GvHD). Cancers that may be treated include tumors that are not vascularized, or not yet substantially vascularized, as well as vascularized tumors. The cancers may comprise non solid tumors (such as hematological tumors, for example, leukemias and lymphomas) or may comprise solid tumors. Types of cancers to be treated with the N-CAR and P-CAR of the invention include, but are not limited to, carcinoma, blastoma, and sarcoma, and certain leukemia or lymphoid malignancies, benign and malignant tumors, and malignancies e.g., sarcomas, carcinomas, and melanomas. Adult tumors/cancers and pediatric tumors/cancers are also included.

[0958] It can be a treatment in combination with one or more therapies against cancer selected from the group of antibodies therapy, chemotherapy, cytokines therapy, dendritic cell therapy, gene therapy, hormone therapy, laser light therapy and radiation therapy.

[0959] The administration of the cells or population of cells according to the present invention may be carried out in any convenient manner, including by aerosol inhalation, injection, ingestion, transfusion, implantation or transplantation. The compositions described herein may be administered to a patient subcutaneously, intradermally, intratumorally, intranodally, intramedullary, intramuscularly, by intravenous or intralymphatic injection, or intraperitoneally. In one embodiment, the cell compositions of the present invention are preferably administered by intravenous injection.

[0960] The administration of the cells or population of cells can consist of the administration of 10⁴-10¹⁰ cells per kg body weight, preferably 10⁵ to 10⁶ cells/kg body weight including all integer values of cell numbers within those ranges. The cells or population of cells can be administrated in one or more doses. In another embodiment, said effective amount of cells are administrated as a single dose. In another embodiment, said effective amount of cells are administrated as more than one dose over a period time. Timing of administration is within the judgment of managing physician and depends on the clinical condition of the patient. The cells or population of cells may be obtained from any source, such as a blood bank or a donor. While individual needs vary, determination of optimal ranges of effective amounts of a given cell type for a particular disease or conditions within the skill of the art. An effective amount means an amount which provides a therapeutic or prophylactic benefit. The dosage administrated will be dependent upon the age, health and weight of the recipient, kind of concurrent treatment, if any, frequency of treatment and the nature of the effect desired.

[0961] In another embodiment, said effective amount of cells or composition comprising those cells are administrated parenterally. Said administration can be an intravenous administration. Said administration can be directly done by injection within a tumor.

[0962] In certain embodiments of the present invention, cells are administered to a patient in conjunction with (e.g., before, simultaneously or following) any number of relevant treatment modalities, including but not limited to treatment with agents such as antiviral therapy, cidofovir and interleukin-2, Cytarabine (also known as ARA-C) or natalizumab treatment for MS patients or efaliztimab treatment for psoriasis patients or other treatments for PML patients. In further embodiments, the T cells of the invention may be used in combination with chemotherapy, radiation, immunosuppressive agents, such as cyclosporin, azathioprine, methotrexate, mycophenolate, and FK506, antibodies, or other immunoablative agents such as CAMPATH, anti-CD3 antibodies or other antibody therapies, cytoxin, fludaribine, cyclosporin, FK506, rapamycin, mycoplienolic acid, steroids, FR901228, cytokines, and irradiation. These drugs inhibit either the calcium dependent phosphatase calcineurin (cyclosporine and FK506) or inhibit the p7056 kinase that is important for growth factor induced signaling (rapamycin) (Henderson, Naya et al. 1991, Immunology 73(3):316-21; Liu, Albers et al. 1992, 31(16):3896-901; Bierer, Hollander et al. 1993, Curr Opin Immunol 5(5):763-73). In a further embodiment, the cell compositions of the present invention are administered to a patient in conjunction with (e.g., before, simultaneously or following) bone marrow transplantation, T cell ablative therapy using either chemotherapy agents such as, fludarabine, external-beam radiation therapy (XRT), cyclophosphamide, or antibodies such as OKT3 or CAMPATH.

[0963] In another embodiment, the cell compositions of the present invention are administered following B-cell ablative therapy such as agents that react with CD20, e.g., Rituxan. For example, in one embodiment, subjects may undergo standard treatment with high dose chemotherapy followed by peripheral blood stem cell transplantation. In certain embodiments, following the transplant, subjects receive an infusion of the expanded immune cells of the present invention. In an additional embodiment, expanded cells are administered before or following surgery.

### Other Definitions

[0964] Amino acid residues in a polypeptide sequence are designated herein according to the one-letter code, in which, for example, Q means Gln or Glutamine residue, R means Arg or Arginine residue and D means Asp or Aspartic acid residue.
[0965] Nucleotides are designated as follows: one-letter code is used for designating the base of a nucleoside: a is adenine, t is thymine, c is cytosine, and g is guanine. For the degenerated nucleotides, r represents g or a (purine nucleotides), k represents g or t, s represents g or c, w represents a or t, m represents a or c, y represents t or c (pyrimidine nucleotides), d represents g, a or t, v represents g, a or c, b represents g, t or c, h represents a, t or c, and n represents g, a, t or c.
[0966] “As used herein, “nucleic acid” or “polynucleotides” refers to nucleotides and/or polynucleotides, such as deoxyribonucleic acid (DNA) or ribonucleic acid (RNA), oligonucleotides, fragments generated by the polymerase chain reaction (PCR), and fragments generated by any of ligation, scission, endonuclease action, and exonuclease action. Nucleic acid molecules can be composed of monomers that are naturally-occurring nucleotides (such as DNA and RNA), or analogs of naturally-occurring nucleotides (e.g., enantiomeric forms of naturally-occurring nucleotides), or a combination of both. Modified nucleotides can have alterations in sugar moieties and/or in pyrimidine or purine base moieties. Sugar modifications include, for example, replacement of one or more hydroxyl groups with halogens, alkyl groups, amines, and azido groups, or sugars can be functionalized as ethers or esters. Moreover, the entire sugar moiety can be replaced with sterically and electronically similar structures, such as aza-sugars and carbocyclic sugar analogs. Examples of modifications in a base moiety include alkylated purines and pyrimidines, acylated purines or pyrimidines, or other well-known heterocyclic substitutes. Nucleic acid monomers can be linked by phosphodiester bonds or analogs of such linkages. Nucleic acids can be either single stranded or double stranded.
[0967] By chimeric antigen receptor (CAR) is intended molecules that combine a binding domain against a component present on the target cell, for example an antibody-based specificity for a desired antigen (e.g., tumor antigen) with a T cell receptor-activating intracellular domain to generate a chimeric protein that exhibits a specific anti-target cellular immune activity. Generally, CAR consists of an extracellular single chain antibody (scFv) fused to the intracellular signaling domain of the T cell antigen receptor complex zeta chain (scFv:ζ) and have the ability, when expressed in T cells, to redirect antigen recognition based on the monoclonal antibody's specificity.
[0968] By “delivery vector” or “delivery vectors” is intended any delivery vector which can be used in the present invention to put into cell contact (i.e “contacting”) or deliver inside cells or subcellular compartments (i.e “introducing”) agents/chemicals and molecules (proteins or nucleic acids) needed in the present invention. It includes, but is not limited to liposomal delivery vectors, viral delivery vectors, drug delivery vectors, chemical carriers, polymeric carriers, lipoplexes, polyplexes, dendrimers, microbubbles (ultrasound contrast agents), nanoparticles, emulsions or other appropriate transfer vectors. These delivery vectors allow delivery of molecules, chemicals, macromolecules (genes, proteins), or other vectors such as plasmids, peptides developed by Diatos. In these cases, delivery vectors are molecule carriers. By “delivery vector” or “delivery vectors” is also intended delivery methods to perform transfection.
[0969] The terms “vector” or “vectors” refer to a nucleic acid molecule capable of transporting another nucleic acid to which it has been linked. A “vector” in the present invention includes, but is not limited to, a viral vector, a plasmid, a RNA vector or a linear or circular DNA or RNA molecule which may consists of a chromosomal, non chromosomal, semi-synthetic or synthetic nucleic acids. Preferred vectors are those capable of autonomous replication (episomal vector) and/or expression of nucleic acids to which they are linked (expression vectors). Large numbers of suitable vectors are known to those of skill in the art and commercially available.

[0970] Viral vectors include retrovirus, adenovirus, parvovirus (e. g. adenoassociated viruses), coronavirus, negative strand RNA viruses such as orthomyxovirus (e. g., influenza virus), rhabdovirus (e. g., rabies and vesicular stomatitis virus), paramyxovirus (e. g. measles and Sendai), positive strand RNA viruses such as picornavirus and alphavirus, and double-stranded DNA viruses including adenovirus, herpesvirus (e. g., Herpes Simplex virus types 1 and 2, Epstein-Barr virus, cytomegalovirus), and poxvirus (e. g., vaccinia, fowlpox and canarypox). Other viruses include Norwalk virus, togavirus, flavivirus, reoviruses, papovavirus, hepadnavirus, and hepatitis virus, for example. Examples of retroviruses include: avian leukosis-sarcoma, mammalian C-type, B-type viruses, D type viruses, HTLV-BLV group, lentivirus, spumavirus (Coffin, J. M., Retroviridae: The viruses and their replication, In Fundamental Virology, Third Edition, B. N. Fields, et al., Eds., Lippincott-Raven Publishers, Philadelphia, 1996).
[0971] By “lentiviral vector” is meant HIV-Based lentiviral vectors that are very promising for gene delivery because of their relatively large packaging capacity, reduced immunogenicity and their ability to stably transduce with high efficiency a large range of different cell types. Lentiviral vectors are usually generated following transient transfection of three (packaging, envelope and transfer) or more plasmids into producer cells. Like HIV, lentiviral vectors enter the target cell through the interaction of viral surface glycoproteins with receptors on the cell surface. On entry, the viral RNA undergoes reverse transcription, which is mediated by the viral reverse transcriptase complex. The product of reverse transcription is a double-stranded linear viral DNA, which is the substrate for viral integration in the DNA of infected cells. By “integrative lentiviral vectors (or LV)”, is meant such vectors as nonlimiting example, that are able to integrate the genome of a target cell. At the opposite by “non-integrative lentiviral vectors (or NILV)” is meant efficient gene delivery vectors that do not integrate the genome of a target cell through the action of the virus integrase.
[0972] Delivery vectors and vectors can be associated or combined with any cellular permeabilization techniques such as sonoporation or electroporation or derivatives of these techniques.
[0973] by “mutation” is intended the substitution, deletion, insertion of up to one, two, three, four, five, six, seven, eight, nine, ten, eleven, twelve, thirteen, fourteen, fifteen, twenty, twenty five, thirty, fourty, fifty, or more nucleotides/amino acids in a polynucleotide (cDNA, gene) or a polypeptide sequence. The mutation can affect the coding sequence of a gene or its regulatory sequence. It may also affect the structure of the genomic sequence or the structure/stability of the encoded mRNA.
[0974] by “functional variant” is intended a catalytically active mutant of a protein or a protein domain; such mutant may have the same activity compared to its parent protein or protein domain or additional properties, or higher or lower activity.
[0975] “identity” refers to sequence identity between two nucleic acid molecules or polypeptides. Identity can be determined by comparing a position in each sequence which may be aligned for purposes of comparison. When a position in the compared sequence is occupied by the same base, then the molecules are identical at that position. A degree of similarity or identity between nucleic acid or amino acid sequences is a function of the number of identical or matching nucleotides at positions shared by the nucleic acid sequences. Various alignment algorithms and/or programs may be used to calculate the identity between two sequences, including FASTA, or BLAST which are available as a part of the GCG sequence analysis package (University of Wisconsin, Madison, Wis.), and can be used with, e.g., default setting. For example, polypeptides having at least 70%, 85%, 90%, 95%, 98% or 99% identity to specific polypeptides described herein and preferably exhibiting substantially the same functions, as well as polynucleotide encoding such polypeptides, are contemplated.
[0976] The term “subject” or “patient” as used herein includes all members of the animal kingdom including non-human primates and humans.
[0977] By “Transcription Activator like Effector (TALE)” it is meant a binding domain protein wherein sequence specificity is driven by a series of 33-35 amino acids repeats originating from Xanthomonas or Ralstonia bacterial proteins. These repeats differ essentially by two amino acids positions that specify an interaction with a base pair (Boch, Scholze et al. 2009, Science 326(5959):1509-12; Moscou and Bogdanove 2009, Science 326(5959):1501). Each base pair in the DNA target is contacted by a single repeat, with the specificity resulting from the two variant amino acids of the repeat (the so-called repeat variable dipeptide, RVD). TALE binding domains may further comprise an N-terminal translocation domain responsible for the requirement of a first thymine base (To) of the targeted sequence and a C-terminal domain that containing a nuclear localization signals (NLS). A TALE nucleic acid binding domain generally corresponds to an engineered core TALE scaffold comprising a plurality of TALE repeat sequences, each repeat comprising a RVD specific to each nucleotides base of a TALE recognition site. In the present invention, each TALE repeat sequence of said core scaffold is made of 30 to 42 amino acids, more preferably 33 or 34 wherein two critical amino acids (the so-called repeat variable dipeptide, RVD) located at positions 12 and 13 mediates the recognition of one nucleotide of said TALE binding site sequence; equivalent two critical amino acids can be located at positions other than 12 and 13 specially in TALE repeat sequence taller than 33 or 34 amino acids long. Preferably, RVDs associated with recognition of the different nucleotides are HD for recognizing C, NG for recognizing T, NI for recognizing A, NN for recognizing G or A. In another embodiment, critical amino acids 12 and 13 can be mutated towards other amino acid residues in order to modulate their specificity towards nucleotides A, T, C and G and in particular to enhance this specificity. A TALE nucleic acid binding domain usually comprises between 8 and 30 TALE repeat sequences. More preferably, said core scaffold of the present invention comprises between 8 and 20 TALE repeat sequences; again more preferably 15 TALE repeat sequences. It can also comprise an additional single truncated TALE repeat sequence made of 20 amino acids located at the C-terminus of said set of TALE repeat sequences, i.e. an additional C-terminal half-TALE repeat sequence.

[0978] By “primary cell” or “primary cells” are intended cells taken directly from living tissue (i.e. biopsy material) and established for growth in vitro, that have undergone very few population doublings and are therefore more representative of the main functional components and characteristics of tissues from which they are derived from, in comparison to continuous tumorigenic or artificially immortalized cell lines.

[0979] General Methods

[0980] Primary T-Cell Cultures

[0981] T cells were purified from Buffy coat samples using Ficoll gradient density medium. The PBMC layer was recovered and T cells were purified using a commercially available T-cell enrichment kit. Purified T cells were activated in X-Vivo™-15 medium (Lonza) supplemented with 20 ng/mL Human IL-2, 5% Human, and Dynabeads Human T activator CD3/CD28 at a bead:cell ratio 1:1 (Life Technologies).

[0982] CAR mRNA Transfection

[0983] Transfections were done at Day 4 or Day 11 after T-cell purification and activation. 5 millions of cells were transfected with 15 μg of mRNA encoding the different CAR constructs. CAR mRNAs were produced using T7 mRNA polymerase transfections done using Cytopulse technology, by applying two 0.1 mS pulses at 3000V/cm followed by four 0.2 mS pulses at 325V/cm in 0.4 cm gap cuvettes in a final volume of 200 μl of “Cytoporation buffer T” (BTX Harvard Apparatus). Cells were immediately diluted in X-Vivo™-15 media and incubated at 37° C. with 5% CO₂. IL-2 was added 2 h after electroporation at 20 ng/mL.

[0984] Degranulation Assay (CD107a Mobilization)

[0985] T-cells were incubated in 96-well plates (40,000 cells/well), together with an equal amount of cells expressing various levels of the P antigen (eg expression CD123 or CD20) and undetectable level of N antigen or together with an equal amount of cells expressing various levels of the P antigen (eg expression CD123 or CD20) and detectable level of N antigen as determined by flow cytometry analysis using appropriate control(s). Co-cultures were maintained in a final volume of 100 μl of X-Vivo™-15 medium (Lonza) for 6 hours at 37° C. with 5% CO₂. CD107a staining was done during cell stimulation, by the addition of a fluorescent anti-CD107a antibody at the beginning of the co-culture, together with 1 μg/ml of anti-CD49d, 1 μg/ml of anti-CD28, and 1× Monensin solution. After the 6 h incubation period, cells were stained with a fixable viability dye and fluorochrome-conjugated anti-CD8 and analyzed by flow cytometry. The degranulation activity was determined as the % of CD8+/CD107a+ cells, and by determining the mean fluorescence intensity signal (MFI) for CD107a staining among CD8+ cells. Degranulation assays were carried out 24 h after mRNA transfection.

[0986] IFN Gamma Release Assay

[0987] T-cells were incubated in 96-well plates (40,000 cells/well), together with cell lines expressing various levels of the P CAR and/or the N-CAR expressed protein. Co-cultures were maintained in a final volume of 100 μl of X-Vivo™-15 medium (Lonza) for 24 hours at 37° C. with 5% CO₂. After this incubation period the plates were centrifuged at 1500 rpm for 5 minutes and the supernatants were recovered in a new plate. IFN gamma detection in the cell culture supernatants was done by ELISA assay. The IFN gamma release assays were carried by starting the cell co-cultures 24 h after mRNA transfection.

[0988] Cytotoxicity Assay

[0989] T-cells were incubated in 96-well plates (100,000 cells/well), together with 10,000 target cells (expressing CD123) and 10,000 control (CD123neg) cells in the same well. Target and control cells were labelled with fluorescent intracellular dyes (CFSE or Cell Trace Violet) before co-culturing them with CAR+ T-cells. The co-cultures were incubated for 4 hours at 37° C. with 5% CO₂. After this incubation period, cells were labelled with a fixable viability dye and analyzed by flow cytometry. Viability of each cellular population (target cells or P CAR/NCAR neg control cells) was determined and the % of specific cell lysis was calculated. Cytotoxicity assays were carried out 48 h after mRNA transfection.

[0990] T-Cell Transduction

[0991] Transduction of T-cells with recombinant lentiviral vectors expression the CAR was carried out three days after T-cell purification/activation. CAR detection at the surface of T-cells was done using a recombinant protein consisting on the fusion of the extracellular domain of the human CAR expressed protein, together with a murine IgG1 Fc fragment. Binding of this protein to the CAR molecule was detected with a fluorochrome-conjugated secondary antibody targeting the mouse Fc portion of the protein, and analyzed by flow cytometry.

### EXAMPLES

### Example 1. Design of Inhibitory Gate Receptors

[0992] Sequences to construct N-CARs are obtained from the Uniprot database and were restricted to human proteins, excluding in addition type II membrane proteins (N-terminus on the cytoplasmic side of the membrane).

[0993] N-CAR are designed (such as schematized in FIG. 2) to be composed of an antigen targeting domain (anti-CD20 VH &VL of SEQ ID NO. 45-46, anti-BCMA VH & VL of SEQ ID NO. 41-42 and anti-PSMA VH & VL chain of SEQ ID NO. 43-44) fused via a short classical-GS-linker of SEQ ID NO. 39 or SEQ ID NO. 40 to the membrane receptor of interest of SEQ ID NO. 1-36 that included the whole cytoplasmic domain, the transmembrane domain and the amino acid sequence up to the first annotated extracellular topological domain. In case where the extracellular topological domains are not clearly annotated, the fusion point was determined based on other similar receptors. If the resulting extracellular domain was short, an additional portion of the first annotated extracellular topological domain was added.

[0994] N-CAR are cloned in a mammalian expression plasmid upstream a 2A cis-acting hydrolase element of SEQ ID NO. 97 followed by a reporter marker (e.g. fluorescent proteins) of SEQ ID NO. 98-99. Standard molecular biology technics such as PCR, enzymatic restriction digestion and ligation are applied to create all construction, leading to SEQ ID NO. 100-212.

[0995] The production of lentiviral particles to vectorize CARs and N-CAR is performed using commercially available Lentiviral Packaging Mix (Invitrogen) following the manufacturer protocols or, alternatively, the lentiviral particles are obtained directly from commercial manufacturers (Vectalys).

### Example 2. Characterization of N-CARS in Immortalized Human T-Cells

[0996] The P-CAR (expressing CD20 antigen; transduced by SEQ ID NO. 213) model cell line is generated by lentiviral transduction of an immortalized human T-cell line (Jurkat). The transduced cells are purified for positive surface CAR+ expression using bulk FACS sorting or magnetic separation. The whole bulk CAR+ population is then assessed for positive CAR+ driven activation (degranulation/cytotoxicity), proliferation, and cytokine release. The results are presented in FIG. 3. High, medium and low CAR+ expressing sub-population or clonal cells are identified and isolated.

[0997] The appropriate P-CAR (or CAR+) Jurkat cell line or population is then transfected with individual or combination of DNA plasmid encoding N-CARs such as presented in Example 1. The level of activation (degranulation/cytokine secretion) is assessed by FACS in P-CAR/N-CAR positive Jurkat cells using a model cell line expressing both the P-CAR and N-CAR target antigens, a model cell line expressing only the P-CAR antigen and a model cell line expressing only the N-CAR antigen.

[0998] The cytotoxicity of P-CAR/N-CAR positive cells, which are tested versus P-CAR positive cells in presence or absence of target cells, is presented in the following Table 3. The results are expressed as a ratio of CD69 fluorescence between the T cells expressing P-CAR/N-CAR or P-CAR in the presence of target cells and in the absence of target cells.

TABLE 3
Test of cytotoxicity of T cells encoding a P-CAR combined to diverse
N-CARs versus T cells P-CAR only when they are tested with or
without target cells (based on ratio mean CD69 fluorescence
intensity +/− target cells)

| Name of | | | |
|---|---|---|---|
| plasmid | | | |
| encoding | N-CAR | | |
| inhibitory | (inhibitory | | P-CAR & N- |
| sequence | sequence) | P-CAR | CAR |
| pCLS27705 | iFCRL2 | 1.51 | 1.13 |
| pCLS27706 | iFCRL3 | 1.58 | 1.14 |
| pCLS27707 | iFCRL4 | 1.62 | 1.15 |
| pCLS27698 | iCD200R | 1.68 | 1.14 |
| pCLS27708 | iFCRL5 | 1.82 | 1.19 |
| pCLS27699 | iTR10A | 1.76 | 1.01 |
| pCLS27709 | iLIRB2 | 1.68 | 1.17 |
| pCLS27700 | iTR10B | 1.62 | 0.97 |
| pCLS27711 | iLIRB4 | 1.67 | 1.07 |
| pCLS27701 | iTR10D | 1.67 | 1.22 |
| pCLS27712 | iLIRB5 | 1.70 | 1.14 |
| pCLS27713 | iMILR1 | 1.58 | 1.02 |
| pCLS27703 | iFCG2B | 1.66 | 1.14 |
| pCLS27714 | iMPZL1 | 1.65 | 1.14 |
| pCLS27704 | iFCRL1 | 1.72 | 1.10 |
| pCLS27715 | iPILRA | 1.62 | 1.05 |
| pCLS27716 | iPVR | 1.54 | 1.11 |
| pCLS27726 | iKI2L2 | 1.40 | 1.19 |
| pCLS27727 | iKI2L3 | 1.49 | 1.22 |
| pCLS27728 | iKI2L4 | 1.65 | 1.19 |
| pCLS27729 | iKI2LA | 1.64 | 1.21 |
| pCLS27730 | iKI3L1 | 1.70 | 1.13 |
| pCLS27731 | iKI3L2 | 1.62 | 1.25 |
| pCLS27732 | iKI3L3 | 1.64 | 1.15 |
| pCLS27733 | iPECA1 | 1.52 | 1.19 |
| pCLS27725 | iKI2L1 | 1.62 | 1.31 |

[0999] The results shown in the Table 3 that all the N-CARs present a significant inhibitory effect on the P-CAR (encoding CD20 scFvs). This is reflected by a marked reduction of the ratio of mean CD69 fluorescence intensity when the T cells endowing both N-CAR and P-CAR in presence of target cell, when compared to T cells endowing P-CAR only.

[1000] This is particularly the case for the N-CARs encoding the TRAIL inhibitory receptors TR10A, TR10B and TR10D.

### Example 3. Characterization of N-CARS in Primary T-Cells

[1001] N-CAR constructs allowing attenuation of the P-CAR signal (degranulation/cytokine secretion) identified according to Example 2 are subcloned in a lentiviral production plasmid using standard molecular biology, leading to SEQ ID. 214 to 217.

[1002] Primary T-cells are transduced sequentially using N-CAR lentiviral particles SEQ ID. 215 and SEQ ID NO. 217 and P-CAR of SEQ ID. 218. The N-CAR transduced T-cells are purified for positive surface expression using FACS sorting. The P-CAR positive population is then transduced with N-CAR lentiviral particles. Comparative effects of P-CAR/N-CAR and N-CAR engineered primary T-cells is assessed using a engineered target cell line (HEK293) that contained two major populations expressing the target antigens for the P-CAR and N-CAR (antigen P-CAR high/antigen N-CAR high and antigen P-CAR high/antigen N-CAR low). The target cell population is then incubated for 6 hours with the different engineered primary T-cells and the relative proportion of the two target populations (live cells expressing CD19 and PMSA antigens) is recorded.

[1003] The data clearly indicated that the antigen P-CAR-high/antigen N-CAR high target cell population is protected compared to the antigen CAR-high/antigen N-CAR low target cell in the presence of the TR10D engineered N-CAR. Indeed, an increase of the ratio of the percentage of live cells between the two target cell populations (at the three ratio of target/effectors are used: 1/1, 1/3 and 1/10, FIG. 4) is measured.

[1004] The data show a dose dependent effect in the reduction induced by N-CAR.

[1005] Surprisingly, when testing a N-CAR comprising the inhibitory molecule PD-1 in the same conditions, an increase in the ratio of % of target cells antigen P-CAR-high/antigen N-CAR high and antigen P-CAR-high/antigen N-CAR-low is measured.

The application's sequence listing, which the Patent Office published only in electronic form, follows.

SEQUENCE LISTING (219 sequences)

SEQ ID NO: 1 - protein, 348 aa, Homo sapiens
  KIR2DL2 Killer cell immunoglobulin-like receptor 2DL2
MSLMVVSMACVGFFLLQGAWPHEGVHRKPSLLAHPGRLVKSEETVILQCWSDVRFEHFLLHREGKFKDTLHLIGEHHDGVSKANFSIGPMMQDLAGTYRCYGSVTHSPYQLSAPSDPLDIVITGLYEKPSLSAQPGPTVLAGESVTLSCSSRSSYDMYHLSREGEAHECRFSAGPKVNGTFQADFPLGPATHGGTYRCFGSFRDSPYEWSNSSDPLLVSVIGNPSNSWPSPTEPSSKTGNPRHLHILIGTSVVIILFILLFFLLHRWCSNKKNAAVMDQESAGNRTANSEDSDEQDPQEVTYTQLNHCVFTQRKITRPSQRPKTPPTDIIVYAELPNAESRSKVVSCP

SEQ ID NO: 2 - protein, 348 aa, Homo sapiens [sequence omitted]

SEQ ID NO: 3 - protein, 310 aa, Homo sapiens
  FCGR2B Low affinity immunoglobulin gamma Fc region receptor II-b
MGILSFLPVLATESDWADCKSPQPWGHMLLWTAVLFLAPVAGTPAAPPKAVLKLEPQWINVLQEDSVTLTCRGTHSPESDSIQWFHNGNLIPTHTQPSYRFKANNNDSGEYTCQTGQTSLSDPVHLTVLSEWLVLQTPHLEFQEGETIVLRCHSWKDKPLVKVTFFQNGKSKKFSRSDPNFSIPQANHSHSGDYHCTGNIGYTLYSSKPVTITVQAPSSSPMGIIVAVVTGIAVAAIVAAVVALIYCRKKRISALPGYPECREMGETLPEKPANPTNPDEADKVGAENTITYSLLMHPDALEEPDDQNRI

SEQ ID NO: 4 - protein, 341 aa, Homo sapiens
  KIR2DL3 Killer cell immunoglobulin-like receptor 2DL3
MSLMVVSMVCVGFFLLQGAWPHEGVHRKPSLLAHPGPLVKSEETVILQCWSDVRFQHFLLHREGKFKDTLHLIGEHHDGVSKANFSIGPMMQDLAGTYRCYGSVTHSPYQLSAPSDPLDIVITGLYEKPSLSAQPGPTVLAGESVTLSCSSRSSYDMYHLSREGEAHERRFSAGPKVNGTFQADFPLGPATHGGTYRCFGSFRDSPYEWSNSSDPLLVSVTGNPSNSWPSPTEPSSETGNPRHLHVLIGTSVVIILFILLLFFLLHRWCCNKKNAVVMDQEPAGNRTVNREDSDEQDPQEVTYAQLNHCVFTQRKITRPSQRPKTPPTDIIVYTELPNAEP

SEQ ID NO: 5 - protein, 455 aa, Homo sapiens
  KIR3DL2 Killer cell immunoglobulin-like receptor 3DL2
MSLTVVSMACVGFFLLQGAWPLMGGQDKPFLSARPSTVVPRGGHVALQCHYRRGFNNFMLYKEDRSHVPIFHGRIFQESFIMGPVTPAHAGTYRCRGSRPHSLTGWSAPSNPLVIMVTGNHRKPSLLAHPGPLLKSGETVILQCWSDVMFEHFFLHREGISEDPSRLVGQIHDGVSKANFSIGPLMPVLAGTYRCYGSVPHSPYQLSAPSDPLDIVITGLYEKPSLSAQPGPTVQAGENVTLSCSSWSSYDIYHLSREGEAHERRLRAVPKVNRTFQADFPLGPATHGGTYRCFGSFRALPCVWSNSSDPLLVSVTGNPSSSWPSPTEPSSKSGICRHLHVLIGTSVVIFLFILLLFFLLYRWCSNKKNAAVMDQEPAGDRTVNRQDSDEQDPQEVTYAQLDHCVFIQRKISRPSQRPKTPLTDTSVYTELPNAEPRSKVVSCPRAPQSGLEGVF

SEQ ID NO: 6 - protein, 377 aa, Homo sapiens
  KIR2DL4 Killer cell immunoglobulin-like receptor 2DL4
MSMSPTVIILACLGFFLDQSVWAHVGGQDKPFCSAWPSAVVPQGGHVTLRCHYRRGFNIFTLYKKDGVPVPELYNRIFWNSFLISPVTPAHAGTYRCRGFHPHSPTEWSAPSNPLVIMVTGLYEKPSLTARPGPTVRAGENVTLSCSSQSSFDIYHLSREGEAHELRLPAVPSINGTFQADFPLGPATHGETYRCFGSFHGSPYEWSDPSDPLPVSVTGNPSSSWPSPTEPSFKTGIARHLHAVIRYSVAIILFTILPFFLLHRWCSKKKDAAVMNQEPAGHRTVNREDSDEQDPQEVTYAQLDHCIFTQRKITGPSQRSKRPSTDTSVCIELPNAEPRALSPAHEHHSQALMGSSRETTALSQTQLASSNVPAAGI

SEQ ID NO: 7 - protein, 444 aa, Homo sapiens
  KIR3DL1 Killer cell immunoglobulin-like receptor 3DL1
MSLMVVSMACVGLFLVQRAGPHMGGQDKPFLSAWPSAVVPRGGHVTLRCHYRHRFNNFMLYKEDRIHIPIFHGRIFQESFNMSPVTTAHAGNYTCRGSHPHSPTGWSAPSNPVVIMVTGNHRKPSLLAHPGPLVKSGERVILQCWSDIMFEHFFLHKEGISKDPSRLVGQIHDGVSKANFSIGPMMLALAGTYRCYGSVTHTPYQLSAPSDPLDIVVTGPYEKPSLSAQPGPKVQAGESVTLSCSSRSSYDMYHLSREGGAHERRLPAVRKVNRTFQADFPLGPATHGGTYRCFGSFRHSPYEWSDPSDPLLVSVTGNPSSSWPSPTEPSSKSGNPRHLHILIGTSVVIILFILLLFFLLHLWCSNKKNAAVMDQEPAGNRTANSEDSDEQDPEEVTYAQLDHCVFTQRKITRPSQRPKTPPTDTILYTELPNAKPRSKVVSCP

SEQ ID NO: 8 - protein, 375 aa, Homo sapiens
  KIR2DL5A Killer cell immunoglobulin-like receptor 2DL5A
MSLMVISMACVGFFLLQGAWTHEGGQDKPLLSAWPSAVVPRGGHVTLLCRSRLGFTIFSLYKEDGVPVPELYNKIFWKSILMGPVTPAHAGTYRCRGSHPRSPIEWSAPSNPLVIVVTGLFGKPSLSAQPGPTVRTGENVTLSCSSRSSFDMYHLSREGRAHEPRLPAVPSVNGTFQADFPLGPATHGGTYTCFGSLHDSPYEWSDPSDPLLVSVTGNSSSSSSSPTEPSSKTGIRRHLHILIGTSVAIILFIILFFFLLHCCCSNKKNAAVMDQEPAGDRTVNREDSDDQDPQEVTYAQLDHCVFTQTKITSPSQRPKTPPTDTTMYMELPNAKPRSLSPAHKHHSQALRGSSRETTALSQNRVASSHVPAAGI

SEQ ID NO: 9 - protein, 343 aa, Homo sapiens
  MILR1 Allergin-1 (Allergy inhibitory receptor 1)
MWSHLNRLLFWSIFSSVTCRKAVLDCEAMKTNEFPSPCLDSKTKVVMKGQNVSMFCSHKNKSLQITYSLFRRKTHLGTQDGKGEPAIFNLSITEAHESGPYKCKAQVTSCSKYSRDFSFTIVDPVTSPVLNIMVIQTETDRHITLHCLSVNGSLPINYTFFENHVAISPAISKYDREPAEFNLTKKNPGEEEEYRCEAKNRLPNYATYSHPVTMPSTGGDSCPFCLKLLLPGLLLLLVVIILILAFWVLPKYKTRKAMRNNVPRDRGDTAMEVGIYANILEKQAKEESVPEVGSRPCVSTAQDEAKHSQELQYATPVFQEVAPREQEACDSYKSGYVYSELNF

SEQ ID NO: 10 - protein, 448 aa, Homo sapiens
  LILRB4 Leukocyte immunoglobulin-like receptor subfamily B member 4
MIPTFTALLCLGLSLGPRTHMQAGPLPKPTLWAEPGSVISWGNSVTIWCQGTLEAREYRLDKEESPAPWDRQNPLEPKNKARFSIPSMTEDYAGRYRCYYRSPVGWSQPSDPLELVMTGAYSKPTLSALPSPLVTSGKSVTLLCQSRSPMDTFLLIKERAAHPLLHLRSEHGAQQHQAEFPMSPVTSVHGGTYRCFSSHGFSHYLLSHPSDPLELIVSGSLEDPRPSPTRSVSTAAGPEDQPLMPTGSVPHSGLRRHWEVLIGVLVVSILLLSLLLFLLLQHWRQGKHRTLAQRQADFQRPPGAAEPEPKDGGLQRRSSPAADVQGENFCAAVKNTQPEDGVEMDTRQSPHDEDPQAVTYAKVKHSRPRREMASPPSPLSGEFLDTKDRQAEEDRQMDTEAAASEAPQDVTYAQLHSFTLRQKATEPPPSQEGASPAEPSVYATLAIH

SEQ ID NO: 11 - protein, 631 aa, Homo sapiens
  LILRB3 Leukocyte immunoglobulin-like receptor subfamily B member 3 (LIR-3)
MTPALTALLCLGLSLGPRTRVQAGPFPKPTLWAEPGSVISWGSPVTIWCQGSQEAQEYRLHKEGSPEPLDRNNPLEPKNKARFSIPSMTEHHAGRYRCHYYSSAGWSEPSDPLEMVMTGAYSKPTLSALPSPVVASGGNMTLRCGSQKGYHHFVLMKEGEHQLPRTLDSQQLHSRGFQALFPVGPVTPSHRWRFTCYYYYTNTPWVWSHPSDPLEILPSGVSRKPSLLTLQGPVLAPGQSLTLQCGSDVGYNRFVLYKEGERDFLQRPGQQPQAGLSQANFTLGPVSPSNGGQYRCYGAHNLSSEWSAPSDPLNILMAGQIYDTVSLSAQPGPTVASGENVTLLCQSWWQFDTFLLTKEGAAHPPLRLRSMYGAHKYQAEFPMSPVTSAHAGTYRCYGSYSSNPHLLSHPSEPLELVVSGHSGGSSLPPTGPPSTPGLGRYLEVLIGVSVAFVLLLFLLLFLLLRRQRHSKHRTSDQRKTDFQRPAGAAETEPKDRGLLRRSSPAADVQEENLYAAVKDTQSEDRVELDSQSPHDEDPQAVTYAPVKHSSPRREMASPPSSLSGEFLDTKDRQVEEDRQMDTEAAASEASQDVTYAQLHSLTLRRKATEPPPSQEGEPPAEPSIYATLAIH

SEQ ID NO: 12 - protein, 410 aa, Homo sapiens
  KIR3DL3 Killer cell immunoglobulin-like receptor 3DL3
MSLMVVSMACVGFFLLEGPWPHVGGQDKPFLSAWPGTVVSEGQHVTLQCRSRLGFNEFSLSKEDGMPVPELYNRIFRNSFLMGPVTPAHAGTYRCCSSHPHSPTGWSAPSNPVVIMVTGVHRKPSLLAHPGPLVKSGETVILQCWSDVRFERFLLHREGITEDPLRLVGQLHDAGSQVNYSMGPMTPALAGTYRCFGSVTHLPYELSAPSDPLDIVVVGLYGKPSLSAQPGPTVQAGENVTLSCSSRSLFDIYHLSREAEAGELRLTAVLRVNGTFQANFPLGPVTHGGNYRCFGSFRALPHAWSDPSDPLPVSVTGNSRHLHVLIGTSVVIIPFAILLFFLLHRWCANKKNAVVMDQEPAGNRTVNREDSDEQDPQEVTYAQLNHCVFTQRKITRPSQRPKTPPTDTSV

SEQ ID NO: 13 - protein, 499 aa, Homo sapiens
  SIGLEC8 Sialic acid-binding Ig-like lectin 8
MLLLLLLLPLLWGTKGMEGDRQYGDGYLLQVQELVTVQEGLCVHVPCSFSYPQDGWTDSDPVHGYWFRAGDRPYQDAPVATNNPDREVQAETQGRFQLLGDIWSNDCSLSIRDARKRDKGSYFFRLERGSMKWSYKSQLNYKTKQLSVFVTALTHRPDILILGTLESGHSRNLTCSVPWACKQGTPPMISWIGASVSSPGPTTARSSVLTLTPKPQDHGTSLTCQVTLPGTGVTTTSTVRLDVSYPPWNLTMTVFQGDATASTALGNGSSLSVLEGQSLRLVCAVNSNPPARLSWTRGSLTLCPSRSSNPGLLELPRVHVRDEGEFTCRAQNAQGSQHISLSLSLQNEGTGTSRPVSQVTLAAVGGAGATALAFLSFCIIFIIVRSCRKKSARPAAGVGDTGMEDAKAIRGSASQGPLTESWKDGNPLKKPPPAVAPSSGEEGELHYATLSFHKVKPQDPQGQEATDSEYSEIKIHKRETAETQACLRNHNPSSKEVRG

SEQ ID NO: 14 - protein, 467 aa, Homo sapiens
  SIGLEC7 Sialic acid-binding Ig-like lectin 7
MLLLLLLPLLWGRERVEGQKSNRKDYSLTMQSSVTVQEGMCVHVRCSFSYPVDSQTDSDPVHGYWFRAGNDISWKAPVATNNPAWAVQEETRDRFHLLGDPQTKNCTLSIRDARMSDAGRYFFRMEKGNIKWNYKYDQLSVNVTALTHRPNILIPGTLESGCFQNLTCSVPWACEQGTPPMISWMGTSVSPLHPSTTRSSVLTLIPQPQHHGTSLTCQVTLPGAGVTTNRTIQLNVSYPPQNLTVTVFQGEGTASTALGNSSSLSVLEGQSLRLVCAVDSNPPARLSWTWRSLTLYPSQPSNPLVLELQVHLGDEGEFTCRAQNSLGSQHVSLNLSLQQEYTGKMRPVSGVLLGAVGGAGATALVFLSFCVIFIVVRSCRKKSARPAADVGDIGMKDANTIRGSASQGNLTESWADDNPRHHGLAAHSSGEEREIQYAPLSFHKGEPQDLSGQEATNNEYSEIKIPK

SEQ ID NO: 15 - protein, 590 aa, Homo sapiens
  LILRB5 Leukocyte immunoglobulin-like receptor subfamily B member 5 (CD85 antigen-like family member C )
MTLTLSVLICLGLSVGPRTCVQAGTLPKPTLWAEPASVIARGKPVTLWCQGPLETEEYRLDKEGLPWARKRQNPLEPGAKAKFHIPSTVYDSAGRYRCYYETPAGWSEPSDPLELVATGFYAEPTLLALPSPVVASGGNVTLQCDTLDGLLTFVLVEEEQKLPRTLYSQKLPKGPSQALFPVGPVTPSCRWRFRCYYYYRKNPQVWSNPSDLLEILVPGVSRKPSLLIPQGSVVARGGSLTLQCRSDVGYDIFVLYKEGEHDLVQGSGQQPQAGLSQANFTLGPVSRSHGGQYRCYGAHNLSPRWSAPSDPLDILIAGLIPDIPALSVQPGPKVASGENVTLLCQSWHQIDTFFLTKEGAAHPPLCLKSKYQSYRHQAEFSMSPVTSAQGGTYRCYSAIRSYPYLLSSPSYPQELVVSGPSGDPSLSPTGSTPTPGPEDQPLTPTGLDPQSGLGRHLGVVTGVSVAFVLLLFLLLFLLLRHRHQSKHRTSAHFYRPAGAAGPEPKDQGLQKRASPVADIQEEILNAAVKDTQPKDGVEMDARAAASEAPQDVTYAQLHSLTLRREATEPPPSQEREPPAEPSIYAPLAIH

SEQ ID NO: 16 - protein, 598 aa, Homo sapiens
  LILRB2 Leukocyte immunoglobulin-like receptor subfamily B member 2 (LIR-2)
MTPIVTVLICLGLSLGPRTHVQTGTIPKPTLWAEPDSVITQGSPVTLSCQGSLEAQEYRLYREKKSASWITRIRPELVKNGQFHIPSITWEHTGRYGCQYYSRARWSELSDPLVLVMTGAYPKPTLSAQPSPVVTSGGRVTLQCESQVAFGGFILCKEGEEEHPQCLNSQPHARGSSRAIFSVGPVSPNRRWSHRCYGYDLNSPYVWSSPSDLLELLVPGVSKKPSLSVQPGPVVAPGESLTLQCVSDVGYDRFVLYKEGERDLRQLPGRQPQAGLSQANFTLGPVSRSYGGQYRCYGAHNLSSECSAPSDPLDILITGQIRGTPFISVQPGPTVASGENVTLLCQSWRQFHTFLLTKAGAADAPLRLRSIHEYPKYQAEFPMSPVTSAHAGTYRCYGSLNSDPYLLSHPSEPLELVVSGPSMGSSPPPTGPISTPAGPEDQPLTPTGSDPQSGLGRHLGVVIGILVAVVLLLLLLLLLFLILRHRRQGKHWTSTQRKADFQHPAGAVGPEPTDRGLQWRSSPAADAQEENLYAAVKDTQPEDGVEMDTRAAASEAPQDVTYAQLHSLTLRRKATEPPPSQEREPPAEPSIYATLAIH

SEQ ID NO: 17 - protein, 551 aa, Homo sapiens
  SIGLEC5 Sialic acid-binding Ig-like lectin 5
MLPLLLLPLLWGGSLQEKPVYELQVQKSVTVQEGLCVLVPCSFSYPWRSWYSSPPLYVYWFRDGEIPYYAEVVATNNPDRRVKPETQGRFRLLGDVQKKNCSLSIGDARMEDTGSYFFRVERGRDVKYSYQQNKLNLEVTALIEKPDIHFLEPLESGRPTRLSCSLPGSCEAGPPLTFSWTGNALSPLDPETTRSSELTLTPRPEDHGTNLTCQMKRQGAQVTTERTVQLNVSYAPQTITIFRNGIALEILQNTSYLPVLEGQALRLLCDAPSNPPAHLSWFQGSPALNATPISNTGILELRRVRSAEEGGFTCRAQHPLGFLQIFLNLSVYSLPQLLGPSCSWEAEGLHCRCSFRARPAPSLCWRLEEKPLEGNSSQGSFKVNSSSAGPWANSSLILHGGLSSDLKVSCKAWNIYGSQSGSVLLLQGRSNLGTGVVPAALGGAGVMALLCICLCLIFFLIVKARRKQAAGRPEKMDDEDPIMGTITSGSRKKPWPDSPGDQASPPGDAPPLEEQKELHYASLSFSEMKSREPKDQEAPSTTEYSEIKTSK

SEQ ID NO: 18 - protein, 515 aa, Homo sapiens
  FCRL4 Fc receptor-like protein 4 (FcR-like protein 4)
MLLWASLLAFAPVCGQSAAAHKPVISVHPPWTTFFKGERVTLTCNGFQFYATEKTTWYHRHYWGEKLTLTPGNTLEVRESGLYRCQARGSPRSNPVRLLFSSDSLILQAPYSVFEGDTLVLRCHRRRKEKLTAVKYTWNGNILSISNKSWDLLIPQASSNNNGNYRCIGYGDENDVFRSNFKIIKIQELFPHPELKATDSQPTEGNSVNLSCETQLPPERSDTPLHFNFFRDGEVILSDWSTYPELQLPTVWRENSGSYWCGAETVRGNIHKHSPSLQIHVQRIPVSGVLLETQPSGGQAVEGEMLVLVCSVAEGTGDTTFSWHREDMQESLGRKTQRSLRAELELPAIRQSHAGGYYCTADNSYGPVQSMVLNVTVRETPGNRDGLVAAGATGGLLSALLLAVALLFHCWRRRKSGVGFLGDETRLPPAPGPGESSHSICPAQVELQSLYVDVHPKKGDLVYSEIQTTQLGEEEEANTSRTLLEDKDVSVVYSEVKTQHPDNSAGKISSKDEES

SEQ ID NO: 19 - protein, 738 aa, Homo sapiens
  PECAM1 Platelet endothelial cell adhesion molecule
MQPRWAQGATMWLGVLLTLLLCSSLEGQENSFTINSVDMKSLPDWTVQNGKNLTLQCFADVSTTSHVKPQHQMLFYKDDVLFYNISSMKSTESYFIPEVRIYDSGTYKCTVIVNNKEKTTAEYQLLVEGVPSPRVTLDKKEAIQGGIVRVNCSVPEEKAPIHFTIEKLELNEKMVKLKREKNSRDQNFVILEFPVEEQDRVLSFRCQARIISGIHMQTSESTKSELVTVTESFSTPKFHISPTGMIMEGAQLHIKCTIQVTHLAQEFPEIIIQKDKAIVAHNRHGNKAVYSVMAMVEHSGNYTCKVESSRISKVSSIVVNITELFSKPELESSFTHLDQGERLNLSCSIPGAPPANFTIQKEDTIVSQTQDFTKIASKSDSGTYICTAGIDKVVKKSNTVQIVVCEMLSQPRISYDAQFEVIKGQTIEVRCESISGTLPISYQLLKTSKVLENSTKNSNDPAVFKDNPTEDVEYQCVADNCHSHAKMLSEVLRVKVIAPVDEVQISILSSKVVESGEDIVLQCAVNEGSGPITYKFYREKEGKPFYQMTSNATQAFWTKQKASKEQEGEYYCTAFNRANHASSVPRSKILTVRVILAPWKKGLIAVVIIGVIIALLIIAAKCYFLRKAKAKQMPVEMSRPAVPLLNSNNEKMSDPNMEANSHYGHNDDVRNHAMKPINDNKEPLNSDVQYTEVQVSSAESHKDLGKKDTETVYSEVRKAVPDAVESRYSRTEGSLDGT

SEQ ID NO: 20 - protein, 463 aa, Homo sapiens
  SIGLEC9 Sialic acid-binding Ig-like lectin 9
MLLLLLPLLWGRERAEGQTSKLLTMQSSVTVQEGLCVHVPCSFSYPSHGWIYPGPVVHGYWFREGANTDQDAPVATNNPARAVWEETRDRFHLLGDPHTKNCTLSIRDARRSDAGRYFFRMEKGSIKWNYKHHRLSVNVTALTHRPNILIPGTLESGCPQNLTCSVPWACEQGTPPMISWIGTSVSPLDPSTTRSSVLTLIPQPQDHGTSLTCQVTFPGASVTTNKTVHLNVSYPPQNLTMTVFQGDGTVSTVLGNGSSLSLPEGQSLRLVCAVDAVDSNPPARLSLSWRGLTLCPSQPSNPGVLELPWVHLRDAAEFTCRAQNPLGSQQVYLNVSLQSKATSGVTQGVVGGAGATALVFLSFCVIFVVVRSCRKKSARPAAGVGDTGIEDANAVRGSASQGPLTEPWAEDSPPDQPPPASARSSVGEGELQYASLSFQMVKPWDSRGQEATDTEYSEIKIHR

SEQ ID NO: 21 - protein, 453 aa, Homo sapiens
  SIGLEC6 Sialic acid-binding Ig-like lectin 6
MQGAQEASASEMLPLLLPLLWAGALAQERRFQLEGPESLTVQEGLCVLVPCRLPTTLPASYYGYGYWFLEGADVPVATNDPDEEVQEETRGRFHLLWDPRRKNCSLSIRDARRRDNAAYFFRLKSKWMKYGYTSSKLSVRVMALTHRPNISIPGTLESGHPSNLTCSVPWVCEQGTPPIFSWMSAAPTSLGPRTTQSSVLTITPRPQDHSTNLTCQVTFPGAGVTMERTIQLNVSYAPQKVAISIFQGNSAAFKILQNTSSLPVLEGQALRLLCDADGNPPAHLSWFQGFPALNATPISNTGVLELPQVGSAEEGDFTCRAQHPLGSLQISLSLFVHWKPEGRAGGVLGAVWGASITTLVFLCVCFIFRVKTRRKKAAQPVQNTDDVNPVMVSGSRGHQHQFQTGIVSDHPAEAGPISEDEQELHYAVLHFHKVQPQEPKVTDTEYSEIKIHK

SEQ ID NO: 22 - protein, 364 aa, Homo sapiens
  CD33 Myeloid cell surface antigen
MPLLLLLPLLWAGALAMDPNFWLQVQESVTVQEGLCVLVPCTFFHPIPYYDKNSPVHGYWFREGAIISRDSPVATNKLDQEVQEETQGRFRLLGDPSRNNCSLSIVDARRRDNGSYFFRMERGSTKYSYKSPQLSVHVTDLTHRPKILIPGTLEPGHSKNLTCSVSWACEQGTPPIFSWLSAAPTSLGPRTTHSSVLIITPRPQDHGTNLTCQVKFAGAGVTTERTIQLNVTYVPQNPTTGIFPGDGSGKQETRAGVVHGAIGGAGVTALLALCLCLIFFIVKTHRRKAARTAVGRNDTHPTTGSASPKHQKKSKLHGPTETSSCSGAAPTVEMDEELHYASLNFHGMNPSKDTSTEYSEVRTQ

SEQ ID NO: 23 - protein, 977 aa, Homo sapiens
  FCRL5  Fc receptor-like protein 5
MLLWVILLVLAPVSGQFARTPRPIIFLQPPWTTVFQGERVTLTCKGFRFYSPQKTKWYHRYLGKEILRETPDNILEVQESGEYRCQAQGSPLSSPVHLDFSSASLILQAPLSVFEGDSVVLRCRAKAEVTLNNTIYKNDNVLAFLNKRTDFHIPHACLKDNGAYRCTGYKESCCPVSSNTVKIQVQEPFTRPVLRASSFQPISGNPVTLTCETQLSLERSDVPLRFRFFRDDQTLGLGWSLSPNFQITAMWSKDSGFYWCKAATMPYSVISDSPRSWIQVQIPASHPVLTLSPEKALNFEGTKVTLHCETQEDSLRTLYRFYHEGVPLRHKSVRCERGASISFSLTTENSGNYYCTADNGLGAKPSKAVSLSVTVPVSHPVLNLSSPEDLIFEGAKVTLHCEAQRGSLPILYQFHHEGAALERRSANSAGGVAISFSLTAEHSGNYYCTADNGFGPQRSKAVSLSVTVPVSHPVLTLSSAEALTFEGATVTLHCEVQRGSPQILYQFYHEDMPLWSSSTPSVGRVSFSFSLTEGHSGNYYCTADNGFGPQRSEVVSLFVTVPVSRPILTLRVPRAQAVVGDLLELHCEAPRGSPPILYWFYHEDVTLGSSSAPSGGEASFNLSLTAEHSGNYSCEANNGLVAQHSDTISLSVIVPVSRPILTFRAPRAQAVVGDLLELHCEALRGSSPILYWFYHEDVTLGKISAPSGGGASFNLSLTTEHSGIYSCEADNGLEAQRSEMVTLKVAVPVSRPVLTLRAPGTHAAVGDLLELHCEALRGSPLILYRFFHEDVTLGNRSSPSGGASLNLSLTAEHSGNYSCEADNGLGAQRSETVTLYITGLTANRSGPFATGVAGGLLSIAGLAAGALLLYCWLSRKAGRKPASDPARSPSDSDSQEPTYHNVPAWEELQPVYTNANPRGENVVYSEVRIIQEKKKHAVASDPRHLRNKGSPIIYSEVKVASTPVSGSLFLASSAPHR

SEQ ID NO: 24 - protein, 508 aa, Homo sapiens
  FCRL2 Fc receptor-like protein 2
MLLWSLLVIFDAVTEQADSLTLVAPSSVFEGDSIVLKCQGEQNWKIQKMAYHKDNKELSVFKKFSDFLIQSAVLSDSGNYFCSTKGQLFLWDKTSNIVKIKVQELFQRPVLTASSFQPIEGGPVSLKCETRLSPQRLDVQLQFCFFRENQVLGSGWSSSPELQISAVWSEDTGSYWCKAETVTHRIRKQSLQSQIHVQRIPISNVSLEIRAPGGQVTEGQKLILLCSVAGGTGNVTFSWYREATGTSMGKKTQRSLSAELEIPAVKESDAGKYYCRADNGHVPIQSKVVNIPVRIPVSRPVLTLRSPGAQAAVGDLLELHCEALRGSPPILYQFYHEDVTLGNSSAPSGGGASFNLSLTAEHSGNYSCEANNGLGAQCSEAVPVSISGPDGYRRDLMTAGVLWGLFGVLGFTGVALLLYALFHKISGESSATNEPRGASRPNPQEFTYSSPTPDMEELQPVYVNVGSVDVDVVYSQVWSMQQPESSANIRTLLENKDSQVIYSSVKKS

SEQ ID NO: 25 - protein, 429 aa, Homo sapiens
  FCRL1 Fc receptor-like protein 1 (CD antigen CD307a)
MLPRLLLLICAPLCEPAELFLIASPSHPTEGSPVTLTCKMPFLQSSDAQFQFCFFRDTRALGPGWSSSPKLQIAAMWKEDTGSYWCEAQTMASKVLRSRRSQINVHRVPVADVSLETQPPGGQVMEGDRLVLICSVAMGTGDITFLWYKGAVGLNLQSKTQRSLTAEYEIPSVRESDAEQYYCVAENGYGPSPSGLVSITVRIPVSRPILMLRAPRAQAAVEDVLELHCEALRGSPPILYWFYHEDITLGSRSAPSGGGASFNLSLTEEHSGNYSCEANNGLGAQRSEAVTLNFTVPTGARSNHLTSGVIEGLLSTLGPATVALLFCYGLKRKIGRRSARDPLRSLPSPLPQEFTYLNSPTPGQLQPIYENVNVVSGDEVYSLAYYNQPEQESVAAETLGTHMEDKVSLDIYSRLRKANITDVDYEDAM

SEQ ID NO: 26 - protein, 595 aa, Homo sapiens
  SIGLEC12 Sialic acid-binding Ig-like lectin 12
MLLLLLLLPPLLCGRVGAKEQKDYLLTMQKSVTVQEGLCVSVLCSFSYPQNGWTASDPVHGYWFRAGDHVSRNIPVATNNPARAVQEETRDRFHLLGDPQNKDCTLSIRDTRESDAGTYVFCVERGNMKWNYKYDQLSVNVTASQDLLSRYRLEVPESVTVQEGLCVSVPCSVLYPHYNWTASSPVYGSWFKEGADIPWDIPVATNTPSGKVQEDTHGRFLLLGDPQTNNCSLSIRDARKGDSGKYYFQVERGSRKWNYIYDKLSVHVTALTHMPTFSIPGTLESGHPRNLTCSVPWACEQGTPPTITWMGASVSSLDPTITRSSMLSLIPQPQDHGTSLTCQVTLPGAGVTMTRAVRLNISYPPQNLTMTVFQGDGTASTTLRNGSALSVLEGQSLHLVCAVDSNPPARLSWTWGSLTLSPSQSSNLGVLELPRVHVKDEGEFTCRAQNPLGSQHISLSLSLQNEYTGKMRPISGVTLGAFGGAGATALVFLYFCIIFVVVRSCRKKSARPAVGVGDTGMEDANAVRGSASQGPLIESPADDSPPHHAPPALATPSPEEGEIQYASLSFHKARPQYPQEQEAIGYEYSEINIPK

SEQ ID NO: 27 - protein, 734 aa, Homo sapiens
  FCRL3  Fc receptor-like protein 3
MLLWLLLLILTPGREQSGVAPKAVLLLNPPWSTAFKGEKVALICSSISHSLAQGDTYWYHDEKLLKIKHDKIQITEPGNYQCKTRGSSLSDAVHVEFSPDWLILQALHPVFEGDNVILRCQGKDNKNTHQKVYYKDGKQLPNSYNLEKITVNSVSRDNSKYHCTAYRKFYILDIEVTSKPLNIQVQELFLHPVLRASSSTPIEGSPMTLTCETQLSPQRPDVQLQFSLFRDSQTLGLGWSRSPRLQIPAMWTEDSGSYWCEVETVTHSIKKRSLRSQIRVQRVPVSNVNLEIRPTGGQLIEGENMVLICSVAQGSGTVTFSWHKEGRVRSLGRKTQRSLLAELHVLTVKESDAGRYYCAADNVHSPILSTWIRVTVRIPVSHPVLTFRAPRAHTVVGDLLELHCESLRGSPPILYRFYHEDVTLGNSSAPSGGGASFNLSLTAEHSGNYSCDADNGLGAQHSHGVSLRVTVPVSRPVLTLRAPGAQAVVGDLLELHCESLRGSFPILYWFYHEDDTLGNISAHSGGGASFNLSLTTEHSGNYSCEADNGLGAQHSKVVTLNVTGTSRNRTGLTAAGITGLVLSILVLAAAAALLHYARARRKPGGLSATGTSSHSPSECQEPSSSRPSRIDPQEPTHSKPLAPMELEPMYSNVNPGDSNPIYSQIWSIQHTKENSANCPMMHQEHEELTVLYSELKKTHPDDSAGEASSRGRAHEEDDEENYENVPRVLLASDH

SEQ ID NO: 28 - protein, 269 aa, Homo sapiens
  MPZL1 Myelin protein zero-like protein 1
MAASAGAGAVIAAPDSRRWLWSVLAAALGLLTAGVSALEVYTPKEIFVANGTQGKLTCKFKSTSTTGGLTSVSWSFQPEGADTTVSFFHYSQGQVYLGNYPPFKDRISWAGDLDKKDASINIENMQFIHNGTYICDVKNPPDIVVQPGHIRLYVVEKENLPVFPVWVVVGIVTAVVLGLTLLISMILAVLYRRKNSKRDYTGCSTSESLSPVKQAPRKSPSDTEGLVKSLPSGSHQGPVIYAQLDHSGGHHSDKINKSESVVYADIRKN

SEQ ID NO: 29 - protein, 303 aa, Homo sapiens
  PILRA Paired immunoglobulin-like type 2 receptor alpha
MGRPLLLPLLPLLLPPAFLQPSGSTGSGPSYLYGVTQPKHLSASMGGSVEIPFSFYYPWELATAPDVRISWRRGHFHRQSFYSTRPPSIHKDYVNRLFLNWTEGQKSGFLRISNLQKQDQSVYFCRVELDTRSSGRQQWQSIEGTKLSITQAVTTTTQRPSSMTTTWRLSSTTTTTGLRVTQGKRRSDSWHISLETAVGVAVAVTVLGIMILGLICLLRWRRRKGQQRTKATTPAREPFQNTEEPYENIRNEGQNTDPKLNPKDDGIVYASLALSSSTSPRAPPSHRPLKSPQNETLYSVLKA

SEQ ID NO: 30 - protein, 417 aa, Homo sapiens
  PVR PVS Poliovirus receptor (Nectin-like protein 5)
MARAMAAAWPLLLVALLVLSWPPPGTGDVVVQAPTQVPGFLGDSVTLPCYLQVPNMEVTHVSQLTWARHGESGSMAVFHQTQGPSYSESKRLEFVAARLGAELRNASLRMFGLRVEDEGNYTCLFVTFPQGSRSVDIWLRVLAKPQNTAEVQKVQLTGEPVPMARCVSTGGRPPAQITWHSDLGGMPNTSQVPGFLSGTVTVTSLWILVPSSQVDGKNVTCKVEHESFEKPQLLTVNLTVYYPPEVSISGYDNNWYLGQNEATLTCDARSNPEPTGYNWSTTMGPLPPFAVAQGAQLLIRPVDKPINTTLICNVTNALGARQAELTVQVKEGPPSEHSGISRNAIIFLVLGILVFLILLGIGIYFYWSKCSREVLWHCHLCPSSTEHASASANGHVSYSAVSRENSSSQDPQTEGTR

SEQ ID NO: 31 - protein, 698 aa, Homo sapiens
  SIGLEC11 Sialic acid-binding Ig-like lectin 11
MVPGQAQPQSPEMLLLPLLLPVLGAGSLNKDPSYSLQVQRQVPVPEGLCVIVSCNLSYPRDGWDESTAAYGYWFKGRTSPKTGAPVATNNQSREVEMSTRDRFQLTGDPGKGSCSLVIRDAQREDEAWYFFRVERGSRVRHSFLSNAFFLKVTALTKKPDVYIPETLEPGQPVTVICVFNWAFKKCPAPSFSWTGAALSPRRTRPSTSHFSVLSFTPSPQDHDTDLTCHVDFSRKGVSAQRTVRLRVAYAPKDLIISISHDNTSALELQGNVIYLEVQKGQFLRLLCAADSQPPATLSWVLQDRVLSSSHPWGPRTLGLELRGVRAGDSGRYTCRAENRLGSQQQALDLSVQYPPENLRVMVSQANRTVLENLGNGTSLPVLEGQSLRLVCVTHSSPPARLSWTRWGQTVGPSQPSDPGVLELPPIQMEHEGEFTCHAQHPLGSQHVSLSLSVHYPPQLLGPSCSWEAEGLHCSCSSQASPAPSLRWWLGEELLEGNSSQGSFEVTPSSAGPWANSSLSLHGGLSSGLRLRCKAWNVHGAQSGSVFQLLPGKLEHGGGLGLGAALGAGVAALLAFCSCLVVFRVKICRKEARKRAAAEQDVPSTLGPISQGHQHECSAGSSQDHPPPGAATYTPGKGEEQELHYASLSFQGLRLWEPADQEAPSTTEYSEIKIHTGQPLRGPGFGLQLEREMSGMVPK

SEQ ID NO: 32 - protein, 697 aa, Homo sapiens
  SIGLEC10 Sialic acid-binding Ig-like lectin 10
MLLPLLLSSLLGGSQAMDGRFWIRVQESVMVPEGLCISVPCSFSYPRQDWTGSTPAYGYWFKAVTETTKGAPVATNHQSREVEMSTRGRFQLTGDPAKGNCSLVIRDAQMQDESQYFFRVERGSYVRYNFMNDGFFLKVTALTQKPDVYIPETLEPGQPVTVICVFNWAFEECPPPSFSWTGAALSSQGTKPTTSHFSVLSFTPRPQDHNTDLTCHVDFSRKGVSAQRTVRLRVAYAPRDLVISISRDNTPALEPQPQGNVPYLEAQKGQFLRLLCAADSQPPATLSWVLQNRVLSSSHPWGPRPLGLELPGVKAGDSGRYTCRAENRLGSQQRALDLSVQYPPENLRVMVSQANRTVLENLGNGTSLPVLEGQSLCLVCVTHSSPPARLSWTQRGQVLSPSQPSDPGVLELPRVQVEHEGEFTCHARHPLGSQHVSLSLSVHYSPKLLGPSCSWEAEGLHCSCSSQASPAPSLRWWLGEELLEGNSSQDSFEVTPSSAGPWANSSLSLHGGLSSGLRLRCEAWNVHGAQSGSILQLPDKKGLISTAFSNGAFLGIGITALLFLCLALIIMKILPKRRTQTETPRPRFSRHSTILDYINVVPTAGPLAQKRNQKATPNSPRTPLPPGAPSPESKKNQKKQYQLPSFPEPKSSTQAPESQESQEELHYATLNFPGVRPRPEARMPKGTQADYAEVKFQ

SEQ ID NO: 33 - protein, 386 aa, Homo sapiens
  TNFRSF10D Tumor necrosis factor receptor superfamily member 10D
MGLWGQSVPTASSARAGRYPGARTASGTRPWLLDPKILKFVVFIVAVLLPVRVDSATIPRQDEVPQQTVAPQQQRRSLKEEECPAGSHRSEYTGACNPCTEGVDYTIASNNLPSCLLCTVCKSGQTNKSSCTTTRDTVCQCEKGSFQDKNSPEMCRTCRTGCPRGMVKVSNCTPRSDIKCKNESAASSTGKTPAAEETVTTILGMLASPYHYLIIIVVLVIILAVVVVGFSCRKKFISYLKGICSGGGGGPERVHRVLFRRRSCPSRVPGAEDNARNETLSNRYLQPTQVSEQEIQGQELAELTGVTVESPEEPQRLLEQAEAEGCQRRRLLVPVNDADSADISTLLDASATLEEGHAKETIQDQLVGSEKLFYEEDEAGSATSCL

SEQ ID NO: 34 - protein, 468 aa, Homo sapiens
  TNFRSF10A Tumor necrosis factor receptor superfamily member 10A
MAPPPARVHLGAFLAVTPNPGSAASGTEAAAATPSKVWGSSAGRIEPRGGGRGALPTSMGQHGPSARARAGRAPGPRPAREASPRLRVHKTFKFVVVGVLLQVVPSSAATIKLHDQSIGTQQWEHSPLGELCPPGSHRSEHPGACNRCTEGVGYTNASNNLFACLPCTACKSDEEERSPCTTTRNTACQCKPGTFRNDNSAEMCRKCSRGCPRGMVKVKDCTPWSDIECVHKESGNGHNIWVILVVTLVVPLLLVAVLIVCCCIGSGCGGDPKCMDRVCFWRLGLLRGPGAEDNAHNEILSNADSLSTFVSEQQMESQEPADLTGVTVQSPGEAQCLLGPAEAEGSQRRRLLVPANGADPTETLMLFFDKFANIVPFDSWDQLMRQLDLTKNEIDVVRAGTAGPGDALYAMLMKWVNKTGRNASIHTLLDALERMEERHAREKIQDLLVDSGKFIYLEDGTGSAVSLE

SEQ ID NO: 35 - protein, 440 aa, Homo sapiens
  TNFRSF10B Tumor necrosis factor receptor superfamily member 10B
MEQRGQNAPAASGARKRHGPGPREARGARPGPRVPKTLVLVVAAVLLLVSAESALITQQDLAPQQRAAPQQKRSSPSEGLCPPGHHISEDGRDCISCKYGQDYSTHWNDLLFCLRCTRCDSGEVELSPCTTTRNTVCQCEEGTFREEDSPEMCRKCRTGCPRGMVKVGDCTPWSDIECVHKESGTKHSGEVPAVEETVTSSPGTPASPCSLSGIIIGVTVAAVVLIVAVFVCKSLLWKKVLPYLKGICSGGGGDPERVDRSSQRPGAEDNVLNEIVSILQPTQVPEQEMEVQEPAEPTGVNMLSPGESEHLLEPAEAERSQRRRLLVPANEGDPTETLRQCFDDFADLVPFDSWEPLMRKLGLMDNEIKVAKAEAAGHRDTLYTMLIKWVNKTGRDASVHTLLDALETLGERLAKQKIEDHLLSSGKFMYLEGNADSAMS

SEQ ID NO: 36 - protein, 325 aa, Homo sapiens [sequence omitted]

SEQ ID NO: 37 - protein, 21 aa, artificial sequence
  CD8 signal peptide
MALPVTALLLPLALLLHAARP

SEQ ID NO: 38 - protein, 15 aa, artificial sequence
  GS linker
GGGGSGGGGSGGGGS

SEQ ID NO: 39 - protein, 9 aa, artificial sequence
  GS linker 1
GSGSGAQAA

SEQ ID NO: 40 - protein, 11 aa, artificial sequence
  GS linker 2
ASGAGSGSGSA

SEQ ID NO: 41 - protein, 119 aa, Homo sapiens
  VH chain of BCMA-30 mAb
QVQLVQSGAEVKKPGASVKVSCKASGYSFPDYYINWVRQAPGQGLEWMGWIYFASGNSEYNQKFTGRVTMTRDTSSSTAYMELSSLRSEDTAVYFCASLYDYDWYFDVWGQGTMVTVSS

SEQ ID NO: 42 - protein, 116 aa, Homo sapiens
  VL chain of BCMA-30 mAb
DIVMTQTPLSLSVTPGEPASISCKSSQSLVHSNGNTYLHWYLQKPGQSPQLLIYKVSNRFSGVPDRFSGSGSGADFTLKISRVEAEDVGVYYCAETSHVPWTFGQGTKLEIKRSDP

SEQ ID NO: 43 - protein, 115 aa, Homo sapiens
  VH chain of PSMA mAb
EVQLQQSGPELVKPGTSVRISCKTSGYTFTEYTIHWVKQSHGKSLEWIGNINPNNGGTTYNQKFEDKATLTVDKSSSTAYMELRSLTSEDSAVYYCAAGWNFDYWGQGTTVTVSS

SEQ ID NO: 44 - protein, 115 aa, Homo sapiens
  VL chain of PSMA mAb
DIVMTQSHKFMSTSVGDRVSIICKASQDVGTAVDWYQQKPGQSPKLLIYWASTRHTGVPDRFTGSGSGTDFTLTITNVQSEDLADYFCQQYNSYPLTFGAGTMLDLKRAAARSDP

SEQ ID NO: 45 - protein, 122 aa, Homo sapiens
  VH chain of CD20 mAb
EVQLVESGGGLVQPGRSLRLSCAASGFTFNDYAMHWVRQAPGKGLEWVSTISWNSGSIGYADSVKGRFTISRDNAKKSLYLQMNSLRAEDTALYYCAKDIQYGNYYYGMDVWGQGTTVTVSS

SEQ ID NO: 46 - protein, 111 aa, Homo sapiens
  VL chain of CD20 mAb
EIVLTQSPATLSLSPGERATLSCRASQSVSSYLAWYQQKPGQAPRLLIYDASNRATGIPARFSGSGSGTDFTLTISSLEPEDFAVYYCQQRSNWPITFGQGTRLEIKRSDP

SEQ ID NO: 47 - protein, 113 aa, Homo sapiens
  Klon43 heavy chain variable region
MADYKDIVMTQSHKFMSTSVGDRVNITCKASQNVDSAVAWYQQKPGQSPKALIYSASYRYSGVPDRFTGRGSGTDFTLTISSVQAEDLAVYYCQQYYSTPWTFGGGTKLEIKR

SEQ ID NO: 48 - protein, 127 aa, Homo sapiens
  Klon43 light chain variable region
EVKLVESGGGLVQPGGSLSLSCAASGFTFTDYYMSWVRQPPGKALEWLALIRSKADGYTTEYSASVKGRFTLSRDDSQSILYLQMNALRPEDSATYYCARDAAYYSYYSPEGAMDYWGQGTSVTVSS

SEQ ID NO: 49 - protein, 16 aa, Homo sapiens
  FcgRIIIa hinge
GLAVSTISSFFPPGYQ

SEQ ID NO: 50 - protein, 45 aa, Homo sapiens
  CD8alpha hinge
TTTPAPRPPTPAPTIASQPLSLRPEACRPAAGGAVHTRGLDFACD

SEQ ID NO: 51 - protein, 231 aa, Homo sapiens
  IgG1 hinge
EPKSPDKTHTCPPCPAPPVAGPSVFLFPPKPKDTLMIARTPEVTCVVVDVSHEDPEVKFNWYVDGVEVHNAKTKPREEQYNSTYRVVSVLTVLHQDWLNGKEYKCKVSNKALPAPIEKTISKAKGQPREPQVYTLPPSRDELTKNQVSLTCLVKGFYPSDIAVEWESNGQPENNYKTTPPVLDSDGSFFLYSKLTVDKSRWQQGNVFSCSVMHEALHNHYTQKSLSLSPGK

SEQ ID NO: 52 - protein, 24 aa, Homo sapiens
  CD8alpha transmembrane domain
IYIWAPLAGTCGVLLLSLVITLYC

SEQ ID NO: 53 - protein, 27 aa, Homo sapiens
  41BB transmembrane domain
IISFFLALTSTALLFLLFFLTLRFSVV

SEQ ID NO: 54 - protein, 42 aa, Homo sapiens
  Fragment of 4-1BB (residues 214-255)
KRGRKKLLYIFKQPFMRPVQTTQEEDGCSCRFPEEEEGGCEL

SEQ ID NO: 55 - protein, 112 aa, Homo sapiens
  Fragment of T-cell surface glycoprotein CD3 zeta chain
RVKFSRSADAPAYQQGQNQLYNELNLGRREEYDVLDKRRGRDPEMGGKPRRKNPQEGLYNELQKDKMAEAYSEIGMKGERRRGKGHDGLYQGLSTATKDTYDALHMQALPPR

SEQ ID NO: 56 - protein, 449 aa, artificial sequence
  Anti-CD123 (Klo43) polypeptide CAR-v1 sequence
EVKLVESGGGLVQPGGSLSLSCAASGFTFTDYYMSWVRQPPGKALEWLALIRSKADGYTTEYSASVKGRFTLSRDDSQSILYLQMNALRPEDSATYYCARDAAYYSYYSPEGAMDYWGQGTSVTVSSGGGGSGGGGSGGGGSMADYKDIVMTQSHKFMSTSVGDRVNITCKASQNVDSAVAWYQQKPGQSPKALIYSASYRYSGVPDRFTGRGSGTDFTLTISSVQAEDLAVYYCQQYYSTPWTFGGGTKLEIKRGLAVSTISSFFPPGYQIYIWAPLAGTCGVLLLSLVITLYCKRGRKKLLYIFKQPFMRPVQTTQEEDGCSCRFPEEEEGGCELRVKFSRSADAPAYQQGQNQLYNELNLGRREEYDVLDKRRGRDPEMGGKPRRKNPQEGLYNELQKDKMAEAYSEIGMKGERRRGKGHDGLYQGLSTATKDTYDALHMQALPPR

SEQ ID NO: 57 - protein, 452 aa, artificial sequence
  Anti-CD123 (Klo43) polypeptide CAR-v2 sequence
EVKLVESGGGLVQPGGSLSLSCAASGFTFTDYYMSWVRQPPGKALEWLALIRSKADGYTTEYSASVKGRFTLSRDDSQSILYLQMNALRPEDSATYYCARDAAYYSYYSPEGAMDYWGQGTSVTVSSGGGGSGGGGSGGGGSMADYKDIVMTQSHKFMSTSVGDRVNITCKASQNVDSAVAWYQQKPGQSPKALIYSASYRYSGVPDRFTGRGSGTDFTLTISSVQAEDLAVYYCQQYYSTPWTFGGGTKLEIKRGLAVSTISSFFPPGYQIISFFLALTSTALLFLLFFLTLRFSVVKRGRKKLLYIFKQPFMRPVQTTQEEDGCSCRFPEEEEGGCELRVKFSRSADAPAYQQGQNQLYNELNLGRREEYDVLDKRRGRDPEMGGKPRRKNPQEGLYNELQKDKMAEAYSEIGMKGERRRGKGHDGLYQGLSTATKDTYDALHMQALPPR

SEQ ID NO: 58 - protein, 478 aa, artificial sequence
  Anti-CD123 (Klo43) polypeptide CAR-v3 sequence
EVKLVESGGGLVQPGGSLSLSCAASGFTFTDYYMSWVRQPPGKALEWLALIRSKADGYTTEYSASVKGRFTLSRDDSQSILYLQMNALRPEDSATYYCARDAAYYSYYSPEGAMDYWGQGTSVTVSSGGGGSGGGGSGGGGSMADYKDIVMTQSHKFMSTSVGDRVNITCKASQNVDSAVAWYQQKPGQSPKALIYSASYRYSGVPDRFTGRGSGTDFTLTISSVQAEDLAVYYCQQYYSTPWTFGGGTKLEIKRTTTPAPRPPTPAPTIASQPLSLRPEACRPAAGGAVHTRGLDFACDIYIWAPLAGTCGVLLLSLVITLYCKRGRKKLLYIFKQPFMRPVQTTQEEDGCSCRFPEEEEGGCELRVKFSRSADAPAYQQGQNQLYNELNLGRREEYDVLDKRRGRDPEMGGKPRRKNPQEGLYNELQKDKMAEAYSEIGMKGERRRGKGHDGLYQGLSTATKDTYDALHMQALPPR

SEQ ID NO: 59 - protein, 481 aa, artificial sequence
  Anti-CD123 (Klo43) polypeptide CAR-v4 sequence
EVKLVESGGGLVQPGGSLSLSCAASGFTFTDYYMSWVRQPPGKALEWLALIRSKADGYTTEYSASVKGRFTLSRDDSQSILYLQMNALRPEDSATYYCARDAAYYSYYSPEGAMDYWGQGTSVTVSSGGGGSGGGGSGGGGSMADYKDIVMTQSHKFMSTSVGDRVNITCKASQNVDSAVAWYQQKPGQSPKALIYSASYRYSGVPDRFTGRGSGTDFTLTISSVQAEDLAVYYCQQYYSTPWTFGGGTKLEIKRTTTPAPRPPTPAPTIASQPLSLRPEACRPAAGGAVHTRGLDFACDIISFFLALTSTALLFLLFFLTLRFSVVKRGRKKLLYIFKQPFMRPVQTTQEEDGCSCRFPEEEEGGCELRVKFSRSADAPAYQQGQNQLYNELNLGRREEYDVLDKRRGRDPEMGGKPRRKNPQEGLYNELQKDKMAEAYSEIGMKGERRRGKGHDGLYQGLSTATKDTYDALHMQALPPR

SEQ ID NO: 60 - protein, 664 aa, artificial sequence
  Anti-CD123 (Klo43) polypeptide CAR-v5 sequence
EVKLVESGGGLVQPGGSLSLSCAASGFTFTDYYMSWVRQPPGKALEWLALIRSKADGYTTEYSASVKGRFTLSRDDSQSILYLQMNALRPEDSATYYCARDAAYYSYYSPEGAMDYWGQGTSVTVSSGGGGSGGGGSGGGGSMADYKDIVMTQSHKFMSTSVGDRVNITCKASQNVDSAVAWYQQKPGQSPKALIYSASYRYSGVPDRFTGRGSGTDFTLTISSVQAEDLAVYYCQQYYSTPWTFGGGTKLEIKREPKSPDKTHTCPPCPAPPVAGPSVFLFPPKPKDTLMIARTPEVTCVVVDVSHEDPEVKFNWYVDGVEVHNAKTKPREEQYNSTYRVVSVLTVLHQDWLNGKEYKCKVSNKALPAPIEKTISKAKGQPREPQVYTLPPSRDELTKNQVSLTCLVKGFYPSDIAVEWESNGQPENNYKTTPPVLDSDGSFFLYSKLTVDKSRWQQGNVFSCSVMHEALHNHYTQKSLSLSPGKIYIWAPLAGTCGVLLLSLVITLYCKRGRKKLLYIFKQPFMRPVQTTQEEDGCSCRFPEEEEGGCELRVKFSRSADAPAYQQGQNQLYNELNLGRREEYDVLDKRRGRDPEMGGKPRRKNPQEGLYNELQKDKMAEAYSEIGMKGERRRGKGHDGLYQGLSTATKDTYDALHMQALPPR

SEQ ID NO: 61 - protein, 667 aa, artificial sequence
  Anti-CD123 (Klo43) polypeptide CAR-v6 sequencee
EVKLVESGGGLVQPGGSLSLSCAASGFTFTDYYMSWVRQPPGKALEWLALIRSKADGYTTEYSASVKGRFTLSRDDSQSILYLQMNALRPEDSATYYCARDAAYYSYYSPEGAMDYWGQGTSVTVSSGGGGSGGGGSGGGGSMADYKDIVMTQSHKFMSTSVGDRVNITCKASQNVDSAVAWYQQKPGQSPKALIYSASYRYSGVPDRFTGRGSGTDFTLTISSVQAEDLAVYYCQQYYSTPWTFGGGTKLEIKREPKSPDKTHTCPPCPAPPVAGPSVFLFPPKPKDTLMIARTPEVTCVVVDVSHEDPEVKFNWYVDGVEVHNAKTKPREEQYNSTYRVVSVLTVLHQDWLNGKEYKCKVSNKALPAPIEKTISKAKGQPREPQVYTLPPSRDELTKNQVSLTCLVKGFYPSDIAVEWESNGQPENNYKTTPPVLDSDGSFFLYSKLTVDKSRWQQGNVFSCSVMHEALHNHYTQKSLSLSPGKIISFFLALTSTALLFLLFFLTLRFSVVKRGRKKLLYIFKQPFMRPVQTTQEEDGCSCRFPEEEEGGCELRVKFSRSADAPAYQQGQNQLYNELNLGRREEYDVLDKRRGRDPEMGGKPRRKNPQEGLYNELQKDKMAEAYSEIGMKGERRRGKGHDGLYQGLSTATKDTYDALHMQALPPR

SEQ ID NO: 62 - protein, 464 aa, mus musculus
  anti-human CD19 monoclonal antibody 4G7 immunoglobulin gamma1 heavy chain
MEWSWIFLFLLSGTAGVHSEVQLQQSGPELIKPGASVKMSCKASGYTFTSYVMHWVKQKPGQGLEWIGYINPYNDGTKYNEKFKGKATLTSDKSSSTAYMELSSLTSEDSAVYYCARGTYYYGSRVFDYWGQGTTLTVSSAKTTPPSVYPLAPGSAAQTNSMVTLGCLVKGYFPEPVTVTWNSGSLSSGVHTFPAVLQSDLYTLSSSVTVPSSTWPSETVTCNVAHPASSTKVDKKIVPRDCGCKPCICTVPEVSSVFIFPPKPKDVLTITLTPKVTCVVVDISKDDPEVQFSWFVDDVEVHTAQTQPREEQFNSTFRSVSELPIMHQDWLNGKEFKCRVNSAAFPAPIEKTISKTKGRPKAPQVYTIPPPKEQMAKDKVSLTCMITDFFPEDITVEWQWNGQPAENYKNTQPIMDTDGSYFVYSKLNVQKSNWEAGNTFTCSVLHEGLHNHHTEKSLSHSPGK

SEQ ID NO: 63 - protein, 239 aa, mus musculus
  anti-human CD19 monoclonal antibody 4G7 immunoglobulin kappa light chain
MRCLAEFLGLLVLWIPGAIGDIVMTQAAPSIPVTPGESVSISCRSSKSLLNSNGNTYLYWFLQRPGQSPQLLIYRMSNLASGVPDRFSGSGSGTAFTLRISRVEAEDVGVYYCMQHLEYPFTFGAGTKLELKRADAAPTVSIFPPSSEQLTSGGASVVCFLNNFYPKDINVKWKIDGSERQNGVLNSWTDQDSKDSTYSMSSTLTLTKDEYERHNSYTCEATHKTSTSPIVKSFNRNEC

SEQ ID NO: 64 - protein, 472 aa, artificial sequence
  Anti-CD38 (25A10) polypeptide -V1 CAR
MALPVTALLLPLALLLHAARPPLALLLHAARPEVQLQQSGAELVRPGASVKLSCTASGFNIKDSLIHWVKQRPEQGLEWIGWIDPEDDKTKYAPKFQDKATLTADTSSNTAYLQLSTLTSEDTAIYYCVSRYINYYFAYWGQGTTLTVSSGGGGSGGGGSGGGGSDIVMTQSPSSLTVTAGEKVTMSCKSSQSLLHSGNQRNYLTWYQQKPGQPPKLLIYWASTRESGVPDRFTGSGSGTDFTLTISSVQAEDLAVYYCQNDYDYPYTFGGGTKLEIKGLAVSTISSFFPPGYQIYIWAPLAGTCGVLLLSLVITLYCKRGRKKLLYIFKQPFMRPVQTTQEEDGCSCRFPEEEEGGCELRVKFSRSADAPAYQQGQNQLYNELNLGRREEYDVLDKRRGRDPEMGGKPRRKNPQEGLYNELQKDKMAEAYSEIGMKGERRRGKGHDGLYQGLSTATKDTYDALHMQALPPR

SEQ ID NO: 65 - protein, 490 aa, artificial sequence
  Anti-CD38 (25A10) polypeptide -V2 CAR
MALPVTALLLPLALLLHAARPEVQLQQSGAELVRPGASVKLSCTASGFNIKDSLIHWVKQRPEQGLEWIGWIDPEDDKTKYAPKFQDKATLTADTSSNTAYLQLSTLTSEDTAIYYCVSRYINYYFAYWGQGTTLTVSSGGGGSGGGGSGGGGSDIVMTQSPSSLTVTAGEKVTMSCKSSQSLLHSGNQRNYLTWYQQKPGQPPKLLIYWASTRESGVPDRFTGSGSGTDFTLTISSVQAEDLAVYYCQNDYDYPYTFGGGTKLEIKTTTPAPRPPTPAPTIASQPLSLRPEACRPAAGGAVHTRGLDFACDIYIWAPLAGTCGVLLLSLVITLYCKRGRKKLLYIFKQPFMRPVQTTQEEDGCSCRFPEEEEGGCELRVKFSRSADAPAYQQGQNQLYNELNLGRREEYDVLDKRRGRDPEMGGKPRRKNPQEGLYNELQKDKMAEAYSEIGMKGERRRGKGHDGLYQGLSTATKDTYDALHMQALPPR

SEQ ID NO: 66 - protein, 676 aa, artificial sequence
  Anti-CD38 (25A10) polypeptide -V3 CAR
MALPVTALLLPLALLLHAARPEVQLQQSGAELVRPGASVKLSCTASGFNIKDSLIHWVKQRPEQGLEWIGWIDPEDDKTKYAPKFQDKATLTADTSSNTAYLQLSTLTSEDTAIYYCVSRYINYYFAYWGQGTTLTVSSGGGGSGGGGSGGGGSDIVMTQSPSSLTVTAGEKVTMSCKSSQSLLHSGNQRNYLTWYQQKPGQPPKLLIYWASTRESGVPDRFTGSGSGTDFTLTISSVQAEDLAVYYCQNDYDYPYTFGGGTKLEIKEPKSPDKTHTCPPCPAPPVAGPSVFLFPPKPKDTLMIARTPEVTCVVVDVSHEDPEVKFNWYVDGVEVHNAKTKPREEQYNSTYRVVSVLTVLHQDWLNGKEYKCKVSNKALPAPIEKTISKAKGQPREPQVYTLPPSRDELTKNQVSLTCLVKGFYPSDIAVEWESNGQPENNYKTTPPVLDSDGSFFLYSKLTVDKSRWQQGNVFSCSVMHEALHNHYTQKSLSLSPGKIYIWAPLAGTCGVLLLSLVITLYCKRGRKKLLYIFKQPFMRPVQTTQEEDGCSCRFPEEEEGGCELRVKFSRSADAPAYQQGQNQLYNELNLGRREEYDVLDKRRGRDPEMGGKPRRKNPQEGLYNELQKDKMAEAYSEIGMKGERRRGKGHDGLYQGLSTATKDTYDALHMQALPPR

SEQ ID NO: 67 - protein, 464 aa, artificial sequence
  Anti-CD38 (28F5) polypeptide-V1 CAR
MALPVTALLLPLALLLHAARPQIQLVQSGPELKKPGETVKISCKASGYTFTKYGMNWVKQTPGKGLKWMGWINTNSGEPTYAEEFKGRFAFSLETSASTAYLQINNLKNEDTATYFCARGAYYRYDGEVSYYAMDYWGQGTSVTVSSGGGGSGGGGSGGGGSQIILTQSPAIMSASLGERVTMTCTATSSLSSSYLHWYQQKPGSSPKLWIYSTSHLASGVPARFSGGGSGTSYSLTISSMEAEDAATYYCHQYHLSPYTFGGGTKLEIKGLAVSTISSFFPPGYQIYIWAPLAGTCGVLLLSLVITLYCKRGRKKLLYIFKQPFMRPVQTTQEEDGCSCRFPEEEEGGCELRVKFSRSADAPAYQQGQNQLYNELNLGRREEYDVLDKRRGRDPEMGGKPRRKNPQEGLYNELQKDKMAEAYSEIGMKGERRRGKGHDGLYQGLSTATKDTYDALHMQALPPR

SEQ ID NO: 68 - protein, 493 aa, artificial sequence
  Anti-CD38 (28F5) polypeptide-V2 CAR
MALPVTALLLPLALLLHAARPQIQLVQSGPELKKPGETVKISCKASGYTFTKYGMNWVKQTPGKGLKWMGWINTNSGEPTYAEEFKGRFAFSLETSASTAYLQINNLKNEDTATYFCARGAYYRYDGEVSYYAMDYWGQGTSVTVSSGGGGSGGGGSGGGGSQIILTQSPAIMSASLGERVTMTCTATSSLSSSYLHWYQQKPGSSPKLWIYSTSHLASGVPARFSGGGSGTSYSLTISSMEAEDAATYYCHQYHLSPYTFGGGTKLEIKTTTPAPRPPTPAPTIASQPLSLRPEACRPAAGGAVHTRGLDFACDIYIWAPLAGTCGVLLLSLVITLYCKRGRKKLLYIFKQPFMRPVQTTQEEDGCSCRFPEEEEGGCELRVKFSRSADAPAYQQGQNQLYNELNLGRREEYDVLDKRRGRDPEMGGKPRRKNPQEGLYNELQKDKMAEAYSEIGMKGERRRGKGHDGLYQGLSTATKDTYDALHMQALPPR

SEQ ID NO: 69 - protein, 679 aa, artificial sequence
  Anti-CD38 (28F5) polypeptide-V3 CAR
MALPVTALLLPLALLLHAARPQIQLVQSGPELKKPGETVKISCKASGYTFTKYGMNWVKQTPGKGLKWMGWINTNSGEPTYAEEFKGRFAFSLETSASTAYLQINNLKNEDTATYFCARGAYYRYDGEVSYYAMDYWGQGTSVTVSSGGGGSGGGGSGGGGSQIILTQSPAIMSASLGERVTMTCTATSSLSSSYLHWYQQKPGSSPKLWIYSTSHLASGVPARFSGGGSGTSYSLTISSMEAEDAATYYCHQYHLSPYTFGGGTKLEIKEPKSPDKTHTCPPCPAPPVAGPSVFLFPPKPKDTLMIARTPEVTCVVVDVSHEDPEVKFNWYVDGVEVHNAKTKPREEQYNSTYRVVSVLTVLHQDWLNGKEYKCKVSNKALPAPIEKTISKAKGQPREPQVYTLPPSRDELTKNQVSLTCLVKGFYPSDIAVEWESNGQPENNYKTTPPVLDSDGSFFLYSKLTVDKSRWQQGNVFSCSVMHEALHNHYTQKSLSLSPGKIYIWAPLAGTCGVLLLSLVITLYCKRGRKKLLYIFKQPFMRPVQTTQEEDGCSCRFPEEEEGGCELRVKFSRSADAPAYQQGQNQLYNELNLGRREEYDVLDKRRGRDPEMGGKPRRKNPQEGLYNELQKDKMAEAYSEIGMKGERRRGKGHDGLYQGLSTATKDTYDALHMQALPPR

SEQ ID NO: 70 - protein, 462 aa, artificial sequence
  Anti-CD38 (16B5) polypeptide-V1 CAR
MALPVTALLLPLALLLHAARPQAYLQQSGAELVRSGASVKMSCKASGYTFTSYNLHWVKQTPGQGLEWIGYIYPGNGGTNYNQKFKGKATLTADTSSSTAYMQISSLTSEDSAVYFCARGGIYYYGSSLDYWGQGTTLTVSSGGGGSGGGGSGGGGSNIVLTQSPASLAVSLGQRATISCRASESVDNYGTTFMYWYQQKPGQPPKLLIYLASNLESGVPARFSGSGSGTDFTLTIDPVEADDAATYYCQQNKEDPWTFGGGTKLEIKGLAVSTISSFFPPGYQIYIWAPLAGTCGVLLLSLVITLYCKRGRKKLLYIFKQPFMRPVQTTQEEDGCSCRFPEEEEGGCELRVKFSRSADAPAYQQGQNQLYNELNLGRREEYDVLDKRRGRDPEMGGKPRRKNPQEGLYNELQKDKMAEAYSEIGMKGERRRGKGHDGLYQGLSTATKDTYDALHMQALPPR

SEQ ID NO: 71 - protein, 491 aa, artificial sequence
  Anti-CD38 (16B5) polypeptide-V2 CAR
MALPVTALLLPLALLLHAARPQAYLQQSGAELVRSGASVKMSCKASGYTFTSYNLHWVKQTPGQGLEWIGYIYPGNGGTNYNQKFKGKATLTADTSSSTAYMQISSLTSEDSAVYFCARGGIYYYGSSLDYWGQGTTLTVSSGGGGSGGGGSGGGGSNIVLTQSPASLAVSLGQRATISCRASESVDNYGTTFMYWYQQKPGQPPKLLIYLASNLESGVPARFSGSGSGTDFTLTIDPVEADDAATYYCQQNKEDPWTFGGGTKLEIKTTTPAPRPPTPAPTIASQPLSLRPEACRPAAGGAVHTRGLDFACDIYIWAPLAGTCGVLLLSLVITLYCKRGRKKLLYIFKQPFMRPVQTTQEEDGCSCRFPEEEEGGCELRVKFSRSADAPAYQQGQNQLYNELNLGRREEYDVLDKRRGRDPEMGGKPRRKNPQEGLYNELQKDKMAEAYSEIGMKGERRRGKGHDGLYQGLSTATKDTYDALHMQALPPR

SEQ ID NO: 72 - protein, 677 aa, artificial sequence
  Anti-CD38 (16B5) polypeptide-V3 CAR
MALPVTALLLPLALLLHAARPQAYLQQSGAELVRSGASVKMSCKASGYTFTSYNLHWVKQTPGQGLEWIGYIYPGNGGTNYNQKFKGKATLTADTSSSTAYMQISSLTSEDSAVYFCARGGIYYYGSSLDYWGQGTTLTVSSGGGGSGGGGSGGGGSNIVLTQSPASLAVSLGQRATISCRASESVDNYGTTFMYWYQQKPGQPPKLLIYLASNLESGVPARFSGSGSGTDFTLTIDPVEADDAATYYCQQNKEDPWTFGGGTKLEIKEPKSPDKTHTCPPCPAPPVAGPSVFLFPPKPKDTLMIARTPEVTCVVVDVSHEDPEVKFNWYVDGVEVHNAKTKPREEQYNSTYRVVSVLTVLHQDWLNGKEYKCKVSNKALPAPIEKTISKAKGQPREPQVYTLPPSRDELTKNQVSLTCLVKGFYPSDIAVEWESNGQPENNYKTTPPVLDSDGSFFLYSKLTVDKSRWQQGNVFSCSVMHEALHNHYTQKSLSLSPGKIYIWAPLAGTCGVLLLSLVITLYCKRGRKKLLYIFKQPFMRPVQTTQEEDGCSCRFPEEEEGGCELRVKFSRSADAPAYQQGQNQLYNELNLGRREEYDVLDKRRGRDPEMGGKPRRKNPQEGLYNELQKDKMAEAYSEIGMKGERRRGKGHDGLYQGLSTATKDTYDALHMQALPPR

SEQ ID NO: 73 - protein, 9 aa, artificial sequence
  mimotope 1 for the use of cetuximab
CPYSNPSLC

SEQ ID NO: 74 - protein, 12 aa, artificial sequence
  mimotope 2 for the use of cetuximab
CQFDLSTRRLKC

SEQ ID NO: 75 - protein, 12 aa, artificial sequence
  mimotope 3 for the use of cetuximab
CQYNLSSRALKC

SEQ ID NO: 76 - protein, 12 aa, artificial sequence
  mimotope 4 for the use of cetuximab
CVWQRWQKSYVC

SEQ ID NO: 77 - protein, 12 aa, artificial sequence
  mimotope 5 for the use of cetuximab
CMWDRFSRWYKC

SEQ ID NO: 78 - protein, 24 aa, artificial sequence
  mimotope 1 for the use of palivizumab
NSELLSLINDMPITNDQKKLMSNN

SEQ ID NO: 79 - protein, 25 aa, artificial sequence
  mimotope 1 for the use of nivolumab
SFVLNWYRMSPSNQTDKLAAFPEDR

SEQ ID NO: 80 - protein, 19 aa, artificial sequence
  mimotope 2 for the use of nivolumab
SGTYLCGAISLAPKAQIKE

SEQ ID NO: 81 - protein, 457 aa, Homo sapiens
  human T cell CD 4 antigen
NRGVPFRHLLLVLQLALLPAATQGKKVVLGKKGDTVELTCTASQKKSIQFHWKNSNQIKILGNQGSFLTKGPSKLNDRADSRRSLWDQGNFPLIIKNLKIEDSDTYICEVEDQKEEVQLLVFGLTANSDTHLLQGQSLTLTLESPPGSSPSVQCRSPRGKNIQGGKTLSVSQLELQDSGTWTCTVLQNQKKVEFKIDIVVLAFQKASSIVYKKEGEQVEFSFPLAFTVEKLTGSGELWWQAERASSSKSWITFDLKNKEVSVKRVTQDPKLQMGKKLPLHLTLPQALPQYAGSGNLTLALEAKTGKLHQEVNLVVMRATQLQKNLTCEVWGPTSPKLMLSLKLENKEAKVSKREKAVWVLNPEAGMWQCLLSDSGQVLLESNIKVLPTWSTPVQPMALIVLGGVAGLLLFIGLGIFFCVRCRHRRRQAERMSQIKRLLSEKKTCQCPHRFQKTCSPI

SEQ ID NO: 82 - protein, 297 aa, Homo sapiens
  human B cell CD20 antigen
MTTPRNSVNGTFPAEPMKGPIAMQSGPKPLFRRMSSLVGPTQSFFMRESKTLGAVQIMNGLFHIALGGLLMIPAGIYAPICVTVWYPLWGGIMYIISGSLLAATEKNSRKCLVKGKMIMNSLSLFAAISGMILSIMDILNIKISHFLKMESLNFIRAHTPYINIYNCEPANPSEKNSPSTQYCYSIQSLFLGILSVMLIFAFFQELVIAGIVENEWKRTCSRPKSNIVLLSAEEKKEQTIEIKEEVVGLTETSSQPKNEEDIEIIPIQEEEEEETETNFPEPPQDQESSPIENDSSP

SEQ ID NO: 83 - protein, 847 aa, Homo sapiens
  human B cell CD22 antigen
MHLLGPWLLLLVLEYLAFSDSSKWVFEHPETLYAWEGACVWIPCTYRALDGDLESFILFHNPEYNKNTSKFDGTRLYESTKDGKVPSEQKRVQFLGDKNKNCTLSIHPVHLNDSGQLGLRMESKTEKWMERIHLNVSERPFPPHIQLPPEIQESQEVTLTCLLNFSCYGYPIQLQWLLEGVPMRQAAVTSTSLTIKSVFTRSELKFSPQWSHHGKIVTCQLQDADGKFLSNDTVQLNVKHTPKLEIKVTPSDAIVREGDSVTMTCEVSSSNPEYTTVSWLKDGTSLKKQNTFTLNLREVTKDQSGKYCCQVSNDVGPGRSEEVFLQVQYAPEPSTVQILHSPAVEGSQVEFLCMSLANPLPTNYTWYHNGKEMQGRTEEKVHIPKILPWHAGTYSCVAENILGTGQRGPGAELDVQYPPKKVTTVIQNPMPIREGDTVTLSCNYNSSNPSVTRYEWKPHGAWEEPSLGVLKIQNVGWDNTTIACAACNSWCSWASPVALNVQYAPRDVRVRKIKPLSEIHSGNSVSLQCDFSSSHPKEVQFFWEKNGRLLGKESQLNFDSISPEDAGSYSCWVNNSIGQTASKAWTLEVLYAPRRLRVSMSPGDQVMEGKSATLTCESDANPPVSHYTWFDWNNQSLPYHSQKLRLEPVKVQHSGAYWCQGTNSVGKGRSPLSTLTVYYSPETIGRRVAVGLGSCLAILILAICGLKLQRRWKRTQSQQGLQENSSGQSFFVRNKKVRRAPLSEGPHSLGCYNPMMEDGISYTTLRFPEMNIPRTGDAESSEMQRPPPDCDDTVTYSALHKRQVGDYENVIPDFPEDEGIHYSELIQFGVGERPQAQENVDYVILKH

SEQ ID NO: 84 - protein, 272 aa, Homo sapiens
  human CD25 antigen
MDSYLLMWGLLTFIMVPGCQAELCDDDPPEIPHATFKAMAYKEGTMLNCECKRGFRRIKSGSLYMLCTGNSSHSSWDNQCQCTSSATRNTTKQVTPQPEEQKERKTTEMQSPMQPVDQASLPGHCREPPPWENEATERIYHFVVGQMVYYQCVQGYRALHRGPAESVCKMTHGKTRWTQPQLICTGEMETSQFPGEEKPQASPEGRPESETSCLVTTTDFQIQTEMAATMETSIFTTEYQVAVAGCVFLLISVLLLSGLTWQRRQRKSRRTI

SEQ ID NO: 85 - protein, 1255 aa, Homo sapiens
  human MUC1 antigen
MTPGTQSPFFLLLLLTVLTVVTGSGHASSTPGGEKETSATQRSSVPSSTEKNAVSMTSSVLSSHSPGSGSSTTQGQDVTLAPATEPASGSAATWGQDVTSVPVTRPALGSTTPPAHDVTSAPDNKPAPGSTAPPAHGVTSAPDTRPAPGSTAPPAHGVTSAPDTRPAPGSTAPPAHGVTSAPDTRPAPGSTAPPAHGVTSAPDTRPAPGSTAPPAHGVTSAPDTRPAPGSTAPPAHGVTSAPDTRPAPGSTAPPAHGVTSAPDTRPAPGSTAPPAHGVTSAPDTRPAPGSTAPPAHGVTSAPDTRPAPGSTAPPAHGVTSAPDTRPAPGSTAPPAHGVTSAPDTRPAPGSTAPPAHGVTSAPDTRPAPGSTAPPAHGVTSAPDTRPAPGSTAPPAHGVTSAPDTRPAPGSTAPPAHGVTSAPDTRPAPGSTAPPAHGVTSAPDTRPAPGSTAPPAHGVTSAPDTRPAPGSTAPPAHGVTSAPDTRPAPGSTAPPAHGVTSAPDTRPAPGSTAPPAHGVTSAPDTRPAPGSTAPPAHGVTSAPDTRPAPGSTAPPAHGVTSAPDTRPAPGSTAPPAHGVTSAPDTRPAPGSTAPPAHGVTSAPDTRPAPGSTAPPAHGVTSAPDTRPAPGSTAPPAHGVTSAPDTRPAPGSTAPPAHGVTSAPDTRPAPGSTAPPAHGVTSAPDTRPAPGSTAPPAHGVTSAPDTRPAPGSTAPPAHGVTSAPDTRPAPGSTAPPAHGVTSAPDTRPAPGSTAPPAHGVTSAPDTRPAPGSTAPPAHGVTSAPDTRPAPGSTAPPAHGVTSAPDTRPAPGSTAPPAHGVTSAPDTRPAPGSTAPPAHGVTSAPDTRPAPGSTAPPAHGVTSAPDTRPAPGSTAPPAHGVTSAPDTRPAPGSTAPPAHGVTSAPDTRPAPGSTAPPAHGVTSAPDTRPAPGSTAPPAHGVTSAPDNRPALGSTAPPVHNVTSASGSASGSASTLVHNGTSARATTTPASKSTPFSIPSHHSDTPTTLASHSTKTDASSTHHSSVPPLTSSNHSTSPQLSTGVSFFFLSFHISNLQFNSSLEDPSTDYYQELQRDISEMFLQIYKQGGFLGLSNIKFRPGSVVVQLTLAFREGTINVHDVETQFNQYKTEAASRYNLTISDVSVSDVPFPFSAQSGAGVPGWGIALLVLVCVLVALAIVYLIALAVCQCRRKNYGQLDIFPARDTYHPMSEYPTYHTHGRYVPPSSTDRSPYEKVSAGNGGSSLSYTNPAVAATSANL

SEQ ID NO: 86 - protein, 387 aa, Homo sapiens
  human CD56 antigen
MPVPASWPHPPGPFLLLTLLLGLTEVAGEEELQMIQPEKLLLVTVGKTATLHCTVTSLLPVGPVLWFRGVGPGRELIYNQKEGHFPRVTTVSDLTKRNNMDFSIRISSITPADVGTYYCVKFRKGSPENVEFKSGPGTEMALGAKPSAPVVLGPAARTTPEHTVSFTCESHGFSPRDITLKWFKNGNELSDFQTNVDPTGQSVAYSIRSTARVVLDPWDVRSQVICEVAHVTLQGDPLRGTANLSEAIRVPPTLEVTQQPMRVGNQVNVTCQVRKFYPQSLQLTWSENGNVCQRETASTLTENKDGTYNWTSWFLVNISDQRDDVVLTCQVKHDGQLAVSKRLALEVTVHQKDQSSDATPGPASSLTALLLIAVLLGPIYVPWKQKT

SEQ ID NO: 87 - protein, 1722 aa, Homo sapiens
  human CD205 antigen
MRTGWATPRRPAGLLMLLFWFFDLAEPSGRAANDPFTIVHGNTGKCIKPVYGWIVADDCDETEDKLWKWVSQHRLFHLHSQKCLGLDITKSVNELRMFSCDSSAMLWWKCEHHSLYGAARYRLALKDGHGTAISNASDVWKKGGSEESLCDQPYHEIYTRDGNSYGRPCEFPFLIDGTWHHDCILDEDHSGPWCATTLNYEYDRKWGICLKPENGCEDNWEKNEQFGSCYQFNTQTALSWKEAYVSCQNQGADLLSINSAAELTYLKEKEGIAKIFWIGLNQLYSARGWEWSDHKPLNFLNWDPDRPSAPTIGGSSCARMDAESGLWQSFSCEAQLPYVCRKPLNNTVELTDVWTYSDTRCDAGWLPNNGFCYLLVNESNSWDKAHAKCKAFSSDLISIHSLADVEVVVTKLHNEDIKEEVWIGLKNINIPTLFQWSDGTEVTLTYWDENEPNVPYNKTPNCVSYLGELGQWKVQSCEEKLKYVCKRKGEKLNDASSDKMCPPDEGWKRHGETCYKIYEDEVPFGTNCNLTITSRFEQEYLNDLMKKYDKSLRKYFWTGLRDVDSCGEYNWATVGGRRRAVTFSNWNFLEPASPGGCVAMSTGKSVGKWEVKDCRSFKALSICKKMSGPLGPEEASPKPDDPCPEGWQSFPASLSCYKVFHAERIVRKRNWEEAERFCQALGAHLSSFSHVDEIKEFLHFLTDQFSGQHWLWIGLNKRSPDLQGSWQWSDRTPVSTIIMPNEFQQDYDIRDCAAVKVFHRPWRRGWHFYDDREFIYLRPFACDTKLEWVCQIPKGRTPKTPDWYNPDRAGIHGPPLIIEGSEYWFVADLHLNYEEAVLYCASNHSFLATITSFVGLKAIKNKIANISGDGQKWWIRISEWPIDDHFTYSRYPWHRFPVTFGEECLYMSAKTWLIDLGKPTDCSTKLPFICEKYNVSSLEKYSPDSAAKVQCSEQWIPFQNKCFLKIKPVSLTFSQASDTCHSYGGTLPSVLSQIEQDFITSLLPDMEATLWIGLRWTAYEKINKWTDNRELTYSNFHPLLVSGRLRIPENFFEEESRYHCALILNLQKSPFTGTWNFTSCSERHFVSLCQKYSEVKSRQTLQNASETVKYLNNLYKIIPKTLTWHSAKRECLKSNMQLVSITDPYQQAFLSVQALLHNSSLWIGLFSQDDELNFGWSDGKRLHFSRWAETNGQLEDCVVLDTDGFWKTVDCNDNQPGAICYYSGNETEKEVKPVDSVKCPSPVLNTPWIPFQNCCYNFIITKNRHMATTQDEVHTKCQKLNPKSHILSIRDEKENNFVLEQLLYFNYMASWVMLGITYRNKSLMWFDKTPLSYTHWRAGRPTIKNEKFLAGLSTDGFWDIQTFKVIEEAVYFHQHSILACKIEMVDYKEEYNTTLPQFMPYEDGIYSVIQKKVTWYEALNMCSQSGGHLASVHNQNGQLFLEDIVKRDGFPLWVGLSSHDGSESSFEWSDGSTFDYIPWKGQTSPGNCVLLDPKGTWKHEKCNSVKDGAICYKPTKSKKLSRLTYSSRCPAAKENGSRWIQYKGHCYKSDQALHSFSEAKKLCSKHDHSATIVSIKDEDENKFVSRLMRENNNITMRVWLGLSQHSVDQSWSWLDGSEVTFVKWENKSKSGVGRCSMLIASNETWKKVECEHGFGRVVCKVPLGPDYTAIAIIVATLSILVLMGGLIWFLFQRHRLHLAGFSSVRYAQGVNEDEIMLPSFHD

SEQ ID NO: 88 - protein, 205 aa, Homo sapiens
  human CD83 antigen
MSRGLQLLLLSCAYSLAPATPEVKVACSEDVDLPCTAPWDPQVPYTVSWVKLLEGGEERMETPQEDHLRGQHYHQKGQNGSFDAPNERPYSLKIRNTTSCNSGTYRCTLQDPDGQRNLSGKVILRVTGCPAQRKEETFKKYRAEIVLLLALVIFYLTLIIFTCKFARLQSIFPDFSKAGMERAFLPVTSPNKHLGLVTPHKTELV

SEQ ID NO: 89 - protein, 1456 aa, Homo sapiens [sequence omitted]

SEQ ID NO: 90 - protein, 278 aa, Homo sapiens
  human CD200 antigen
MGSLVFRRPFCHLSTYSLIWGMAAVALSTAQVEVVTQDERKALHTTASLRCSLKTSQEPLIVTWQKKKAVSPENMVTYSKTHGVVIQPAYKDRINVTELGLWNSSITFWNTTLEDEGCYMCLFNTFGSQKVSGTACLTLYVQPIVHLHYNYFEDHLNITCSATARPAPAISWKGTGTGIENSTESHFHSNGTTSVTSILRVKDPKTQVGKEVICQVLYLGNVIDYKQSLDKGFWFSVPLLLSIVSLVILLVLISILLYWKRHRNQERGESSQGMQRMK

SEQ ID NO: 91 - protein, 472 aa, Homo sapiens
  human CD36 antigen
MGCDRNCGLIAGAVIGAVLAVFGGILMPVGDLLIQKTIKKQVVLEEGTIAFKNWVKTGTEVYRQFWIFDVQNPQEVMMNSSNIQVKQRGPYTYRVRFLAKENVTQDAEDNTVSFLQPNGAIFEPSLSVGTEADNFTVLNLAVAAASHIYQNQFVQMILNSLINKSKSSMFQVRTLRELLWGYRDPFLSLVPYPVTTTVGLFYPYNNTADGVYKVFNGKDNISKVAIIDTYKGKRNLSYWESHCDMINGTDAASFPPFVEKSQVLQFFSSDICRSIYAVFESDVNLKGIPVYRFVLPSKAFASPVENPDNYCFCTEKIISKNCTSYGVLDISKCKEGRPVYISLPHFLYASPDVSEPIDGLNPNEEEHRTYLDIEPITGFTLQFAKRLQVNLLVKPSEKIQVLKNLKRNYIVPILWLNETGTIGDEKANMFRSQVTGKINLLGLIEMILLSVGVVMFVAFMISYCACRSKTIK

SEQ ID NO: 92 - protein, 210 aa, Homo sapiens
  human troponin C
MADGSSDAAREPRPAPAPIRRRSSNYRAYATEPHAKKKSKISASRKLQLKTLLLQIAKQELEREAEERRGEKGRALSTRCQPLELAGLGFAELQDLCRQLHARVDKVDEERYDIEAKVTKNITEIADLTQKIFDLRGKFKRPTLRRVRISADAMMQALLGARAKESLDLRAHLKQVKKEDTEKENREVGDWRKNIDALSGMEGRKKKFES

SEQ ID NO: 93 - protein, 798 aa, Homo sapiens
  human beta 1 integrin
MNLQPIFWIGLISSVCCVFAQTDENRCLKANAKSCGECIQAGPNCGWCTNSTFLQEGMPTSARCDDLEALKKKGCPPDDIENPRGSKDIKKNKNVTNRSKGTAEKLKPEDITQIQPQQLVLRLRSGEPQTFTLKFKRAEDYPIDLYYLMDLSYSMKDDLENVKSLGTDLMNEMRRITSDFRIGFGSFVEKTVMPYISTTPAKLRNPCTSEQNCTSPFSYKNVLSLTNKGEVFNELVGKQRISGNLDSPEGGFDAIMQVAVCGSLIGWRNVTRLLVFSTDAGFHFAGDGKLGGIVLPNDGQCHLENNMYTMSHYYDYPSIAHLVQKLSENNIQTIFAVTEEFQPVYKELKNLIPKSAVGTLSANSSNVIQLIIDAYNSLSSEVILENGKLSEGVTISYKSYCKNGVNGTGENGRKCSNISIGDEVQFEISITSNKCPKKDSDSFKIRPLGFTEEVEVILQYICECECQSEGIPESPKCHEGNGTFECGACRCNEGRVGRHCECSTDEVNSEDMDAYCRKENSSEICSNNGECVCGQCVCRKRDNTNEIYSGKFCECDNFNCDRSNGLICGGNGVCKCRVCECNPNYTGSACDCSLDTSTCEASNGQICNGRGICECGVCKCTDPKFQGQTCEMCQTCLGVCAEHKECVQCRAFNKGEKKDTCTQECSYFNITKVESRDKLPQPVQPDPVSHCKEKDVDDCWFYFTYSVNGNNEVMVHVVENPECPTGPDIIPIVAGVVAGIVLIGLALLLIWKLLMIIHDRREFAKFEKEKMNAKWDTGENPIYKSAVTTVVNPKYEGK

SEQ ID NO: 94 - protein, 878 aa, Homo sapiens
  human CCKBR antigen
MATAPSYPAGLPGSPGPGSPPPPGGLELQSPPPLLPQIPAPGSGVSFHIQIGLTREFVLLPAASELAHVKQLACSIVDQKFPECGFYGLYDKILLFKHDPTSANLLQLVRSSGDIQEGDLVEVVLSASATFEDFQIRPHALTVHSYRAPAFCDHCGEMLFGLVRQGLKCDGCGLNYHKRCAFSIPNNCSGARKRRLSSTSLASGHSVRLGTSESLPCTAEELSRSTTELLPRRPPSSSSSSSASSYTGRPIELDKMLLSKVKVPHTFLIHSYTRPTVCQACKKLLKGLFRQGLQCKDCKFNCHKRCATRVPNDCLGEALINGDVPMEEATDFSEADKSALMDESEDSGVIPGSHSENALHASEEEEGEGGKAQSSLGYIPLMRVVQSVRHTTRKSSTTLREGWVVHYSNKDTLRKRHYWRLDCKCITLFQNNTTNRYYKEIPLSEILTVESAQNFSLVPPGTNPHCFEIVTANATYFVGEMPGGTPGGPSGQGAEAARGWETAIRQALMPVILQDAPSAPGHAPHRQASLSISVSNSQIQENVDIATVYQIFPDEVLGSGQFGVVYGGKHRKTGRDVAVKVIDKLRFPTKQESQLRNEVAILQSLRHPGIVNLECMFETPEKVFVVMEKLHGDMLEMILSSEKGRLPERLTKFLITQILVALRHLHFKNIVHCDLKPENVLLASADPFPQVKLCDFGFARIIGEKSFRRSVVGTPAYLAPEVLLNQGYNRSLDMWSVGVIMYVSLSGTFPFNEDEDINDQIQNAAFMYPASPWSHISAGAIDLINNLLQVKMRKRYSVDKSLSHPWLQEYQTWLDLRELEGKMGERYITHESDDVRWEQFAAEHPLPGSGLPTDRDLGGACPPQDHDMQGLAERISVL

SEQ ID NO: 95 - protein, 349 aa, Homo sapiens
  human GALR 1 antigen
MELAVGNLSEGNASWPEPPAPEPGPLFGIGVENFVTLVVFGLIFALGVLGNSLVITVLARSKPGKPRSTTNLFILNLSIADLAYLLFCIPFQATVYALPTWVLGAFICKFIHYFFTVSMLVSIFTLAAMSVDRYVAIVHSRRSSSLRVSRNALLGVGCIWALSIAMASPVAYHQGLFHPRASNQTFCWEQWPDPRHKKAYVVCTFVFGYLLPLLLICFCYAKVLNHLHKKLKNMSKKSEASKKKTAQTVLVVVVVFGISWLPHHIIHLWAEFGVFPLTPASFLFRITAHCLAYSNSSVNPIIYAFLSENFRKAYKQVFKCHIRKDSHLSDTKESKSRIDTPPSTNCTHV

SEQ ID NO: 96 - protein, 3623 aa, Homo sapiens
  human CUBN antigen
MMNMSLPFLWSLLTLLIFAEVNGEAGELELQRQKRSINLQQPRMATERGNLVFLTGSAQNIEFRTGSLGKIKLNDEDLSECLHQIQKNKEDIIELKGSAIGLPQNISSQIYQLNSKLVDLERKFQGLQQTVDKKVCSSNPCQNGGTCLNLHDSFFCICPPQWKGPLCSADVNECEIYSGTPLSCQNGGTCVNTMGSYSCHCPPETYGPQCASKYDDCEGGSVARCVHGICEDLMREQAGEPKYSCVCDAGWMFSPNSPACTLDRDECSFQPGPCSTLVQCFNTQGSFYCGACPTGWQGNGYICEDINECEINNGGCSVAPPVECVNTPGSSHCQACPPGYQGDGRVCTLTDICSVSNGGCHPDASCSSTLGSLPLCTCLPGYTGNGYGPNGCVQLSNICLSHPCLNGQCIDTVSGYFCKCDSGWTGVNCTENINECLSNPCLNGGTCVDGVDSFSCECTRLWTGALCQVPQQVCGESLSGINGSFSYRSPDVGYVHDVNCFWVIKTEMGKVLRITFTFFRLESMDNCPHEFLQVYDGDSSSAFQLGRFCGSSLPHELLSSDNALYFHLYSEHLRNGRGFTVRWETQQPECGGILTGPYGSIKSPGYPGNYPPGRDCVWIVVTSPDLLVTFTFGTLSLEHHDDCNKDYLEIRDGPLYQDPLLGKFCTTFSVPPLQTTGPFARIHFHSDSQISDQGFHITYLTSPSDLRCGGNYTDPEGELFLPELSGPFTHTRQCVYMMKQPQGEQIQINFTHVELQCQSDSSQNYIEVRDGETLLGKVCGNGTISHIKSITNSVWIRFKIDASVEKASFRAVYQVACGDELTGEGVIRSPFFPNVYPGERTCRWTIHQPQSQVILLNFTVFEIGSSAHCETDYVEIGSSSILGSPENKKYCGTDIPSFITSVYNFLYVTFVKSSSTENHGFMAKFSAEDLACGEILTESTGTIQSPGHPNVYPHGINCTWHILVQPNHLIHLMFETFHLEFHYNCTNDYLEVYDTDSETSLGRYCGKSIPPSLTSSGNSLMLVFVTDSDLAYEGFLINYEAISAATACLQDYTDDLGTFTSPNFPNNYPNNWECIYRITVRTGQLIAVHFTNFSLEEAIGNYYTDFLEIRDGGYEKSPLLGIFYGSNLPPTIISHSNKLWLKFKSDQIDTRSGFSAYWDGSSTGCGGNLTTSSGTFISPNYPMPYYHSSECYWWLKSSHGSAFELEFKDFHLEHHPNCTLDYLAVYDGPSSNSHLLTQLCGDEKPPLIRSSGDSMFIKLRTDEGQQGRGFKAEYRQTCENVVIVNQTYGILESIGYPNPYSENQHCNWTIRATTGNTVNYTFLAFDLEHHINCSTDYLELYDGPRQMGRYCGVDLPPPGSTTSSKLQVLLLTDGVGRREKGFQMQWFVYGCGGELSGATGSFSSPGFPNRYPPNKECIWYIRTDPGSSIQLTIHDFDVEYHSRCNFDVLEIYGGPDFHSPRIAQLCTQRSPENPMQVSSTGNELAIRFKTDLSINGRGFNASWQAVTGGCGGIFQAPSGEIHSPNYPSPYRSNTDCSWVIRVDRNHRVLLNFTDFDLEPQDSCIMAYDGLSSTMSRLARTCGREQLANPIVSSGNSLFLRFQSGPSRQNRGFRAQFRQACGGHILTSSFDTVSSPRFPANYPNNQNCSWIIQAQPPLNHITLSFTHFELERSTTCARDFVEILDGGHEDAPLRGRYCGTDMPHPITSFSSALTLRFVSDSSISAGGFHTTVTASVSACGGTFYMAEGIFNSPGYPDIYPPNVECVWNIVSSPGNRLQLSFISFQLEDSQDCSRDFVEIREGNATGHLVGRYCGNSFPLNYSSIVGHTLWVRFISDGSGSGTGFQATFMKIFGNDNIVGTHGKVASPFWPENYPHNSNYQWTVNVNASHVVHGRILEMDIEEIQNCYYDKLRIYDGPSIHARLIGAYCGTQTESFSSTGNSLTFHFYSDSSISGKGFLLEWFAVDAPDGVLPTIAPGACGGFLRTGDAPVFLFSPGWPDSYSNRVDCTWLIQAPDSTVELNILSLDIESHRTCAYDSLVIRDGDNNLAQQLAVLCGREIPGPIRSTGEYMFIRFTSDSSVTRAGFNASFHKSCGGYLHADRGIITSPKYPETYPSNLNCSWHVLVQSGLTIAVHFEQPFQIPNGDSSCNQGDYLVLRNGPDICSPPLGPPGGNGHFCGSHASSTLFTSDNQMFVQFISDHSNEGQGFKIKYEAKSLACGGNVYIHDADSAGYVTSPNHPHNYPPHADCIWILAAPPETRIQLQFEDRFDIEVTPNCTSNYLELRDGVDSDAPILSKFCGTSLPSSQWSSGEVMYLRFRSDNSPTHVGFKAKYSIAQCGGRVPGQSGVVESIGHPTLPYRDNLFCEWHLQGLSGHYLTISFEDFNLQNSSGCEKDFVEIWDNHTSGNILGRYCGNTIPDSIDTSSNTAVVRFVTDGSVTASGFRLRFESSMEECGGDLQGSIGTFTSPNYPNPNPHGRICEWRITAPEGRRITLMFNNLRLATHPSCNNEHVIVFNGIRSNSPQLEKLCSSVNVSNEIKSSGNTMKVIFFTDGSRPYGGFTASYTSSEDAVCGGSLPNTPEGNFTSPGYDGVRNYSRNLNCEWTLSNPNQGNSSISIHFEDFYLESHQDCQFDVLEFRVGDADGPLMWRLCGPSKPTLPLVIPYSQVWIHFVTNERVEHIGFHAKYSFTDCGGIQIGDSGVITSPNYPNAYDSLTHCSSLLEAPQGHTITLTFSDFDIEPHTTCAWDSVTVRNGGSPESPIIGQYCGNSNPRTIQSGSNQLVVTFNSDHSLQGGGFYATWNTQTLGCGGIFHSDNGTIRSPHWPQNFPENSRCSWTAITHKSKHLEISFDNNFLIPSGDGQCQNSFVKVWAGTEEVDKALLATGCGNVAPGPVITPSNTFTAVFQSQEAPAQGFSASFVSRCGSNFTGPSGYIISPNYPKQYDNNMNCTYVIEANPLSVVLLTFVSFHLEARSAVTGSCVNDGVHIIRGYSVMSTPFATVCGDEMPAPLTIAGPVLLNFYSNEQITDFGFKFSYRIISCGGVFNFSSGIITSPAYSYADYPNDMHCLYTITVSDDKVIELKFSDFDVVPSTSCSHDYLAIYDGANTSDPLLGKFCGSKRPPNVKSSNNSMLLVFKTDSFQTAKGWKMSFRQTLGPQQGCGGYLTGSNNTFASPDSDSNGMYDKNLNCVWIIIAPVNKVIHLTFNTFALEAASTRQRCLYDYVKLYDGDSENANLAGTFCGSTVPAPFISSGNFLTVQFISDLTLEREGFNATYTIMDMPCGGTYNATWTPQNISSPNSSDPDVPFSICTWVIDSPPHQQVKITVWALQLTSQDCTQNYLQLQDSPQGHGNSRFQFCGRNASAVPVFYSSMSTAMVIFKSGVVNRNSRMSFTYQIADCNRDYHKAFGNLRSPGWPDNYDNDKDCTVTLTAPQNHTISLFFHSLGIENSVECRNDFLEVRNGSNSNSPLLGKYCGTLLPNPVFSQNNELYLRFKSDSVTSDRGYEIIWTSSPSGCGGTLYGDRGSFTSPGYPGTYPNNTYCEWVLVAPAGRLVTINFYFISIDDPGDCVQNYLTLYDGPNASSPSSGPYCGGDTSIAPFVASSNQVFIKFHADYARRPSAFRLTWDS

SEQ ID NO: 97 - protein, 20 aa, artificial sequence
  2A cis-acting hydrolase element
RAEGRGSLLTCGDVEENPGP

SEQ ID NO: 98 - protein, 242 aa, artificial sequence
  EGFP
MVSKGEELFTGVVPILVELDGDVNGHKFSVSGEGEGDATYGKLTLKFICTTGKLPVPWPTLVTTLTYGVQCFSRYPDHMKQHDFFKSAMPEGYVQERTIFFKDDGNYKTRAEVKFEGDTLVNRIELKGIDFKEDGNILGHKLEYNYNSHNVYIMADKQKNGIKVNFKIRHNIEDGSVQLADHYQQNTPIGDGPVLLPDNHYLSTQSALSKDPNEKRDHMVLLEFVTAAGITLGMDELYKAAD

SEQ ID NO: 99 - protein, 233 aa, artificial sequence
  BFP
MSELIKENMHMKLYMEGTVDNHHFKCTSEGEGKPYEGTQTMRIKVVEGGPLPFAFDILATSFLYGSKTFINHTQGIPDFFKQSFPEGFTWERVTTYEDGGVLTATQDTSLQDGCLIYNVKIRGVNFTSNGPVMQKKTLGWEAFTETLYPADGGLEGRNDMALKLVGGSHLIANIKTTYRSKKPAKNLKMPGVYYVDYRLERIKEANNETYVEQHEVAVARYCDLPSKLGHKLN

SEQ ID NO: 100 - protein, 437 aa, artificial sequence
  Polypeptide encoded by pCLS27463 with BCMA - iPDCD1
MALPVTALLLPLALLLHAARPGSGSGAQAAQVQLVQSGAEVKKPGASVKVSCKASGYSFPDYYINWVRQAPGQGLEWMGWIYFASGNSEYNQKFTGRVTMTRDTSSSTAYMELSSLRSEDTAVYFCASLYDYDWYFDVWGQGTMVTVSSGGGGSGGGGSGGGGSDIVMTQTPLSLSVTPGEPASISCKSSQSLVHSNGNTYLHWYLQKPGQSPQLLIYKVSNRFSGVPDRFSGSGSGADFTLKISRVEAEDVGVYYCAETSHVPWTFGQGTKLEIKRSDPASGAGSGSGSAERRAEVPTAHPSPSPRPAGQFQTLVVGVVGGLLGSLVLLVWVLAVICSRAARGTIGARRTGQPLKEDPSAVPVFSVDYGELDFQWREKTPEPPVPCVPEQTEYATIVFPSGMGTSSPARRGSADGPRSAQPLRPEDGHCSWPLSHG

SEQ ID NO: 101 - protein, 431 aa, artificial sequence
  Polypeptide encoded by pCLS27421 with BCMA - iPD1 -v2
MALPVTALLLPLALLLHAARPQVQLVQSGAEVKKPGASVKVSCKASGYSFPDYYINWVRQAPGQGLEWMGWIYFASGNSEYNQKFTGRVTMTRDTSSSTAYMELSSLRSEDTAVYFCASLYDYDWYFDVWGQGTMVTVSSGGGGSGGGGSGGGGSDIVMTQTPLSLSVTPGEPASISCKSSQSLVHSNGNTYLHWYLQKPGQSPQLLIYKVSNRFSGVPDRFSGSGSGADFTLKISRVEAEDVGVYYCAETSHVPWTFGQGTKLEIKYPLTFGAGTMLDLKRAAATERRAEVPTAHPSPSPRPAGQFQTLVVGVVGGLLGSLVLLVWVLAVICSRAARGTIGARRTGQPLKEDPSAVPVFSVDYGELDFQWREKTPEPPVPCVPEQTEYATIVFPSGMGTSSPARRGSADGPRSAQPLRPEDGHCSWPLSH

SEQ ID NO: 102 - protein, 391 aa, artificial sequence
  Polypeptide encoded by pCLS27446 with BCMA - CD200R1
MALPVTALLLPLALLLHAARPGSGSGAQAAQVQLVQSGAEVKKPGASVKVSCKASGYSFPDYYINWVRQAPGQGLEWMGWIYFASGNSEYNQKFTGRVTMTRDTSSSTAYMELSSLRSEDTAVYFCASLYDYDWYFDVWGQGTMVTVSSGGGGSGGGGSGGGGSDIVMTQTPLSLSVTPGEPASISCKSSQSLVHSNGNTYLHWYLQKPGQSPQLLIYKVSNRFSGVPDRFSGSGSGADFTLKISRVEAEDVGVYYCAETSHVPWTFGQGTKLEIKRSDPASGAGSGSGSAIELLPVPGAKKSAKLYIPYIILTIIILTIVGFIWLLKVNGCRKYKLNKTESTPVVEEDEMQPYASYTEKNNPLYDTTNKVKASEALQSEVDTDLHTLSHG

SEQ ID NO: 103 - protein, 533 aa, artificial sequence
  Polypeptide encoded by pCLS27447 with BCMA - iTR10A
MALPVTALLLPLALLLHAARPGSGSGAQAAQVQLVQSGAEVKKPGASVKVSCKASGYSFPDYYINWVRQAPGQGLEWMGWIYFASGNSEYNQKFTGRVTMTRDTSSSTAYMELSSLRSEDTAVYFCASLYDYDWYFDVWGQGTMVTVSSGGGGSGGGGSGGGGSDIVMTQTPLSLSVTPGEPASISCKSSQSLVHSNGNTYLHWYLQKPGQSPQLLIYKVSNRFSGVPDRFSGSGSGADFTLKISRVEAEDVGVYYCAETSHVPWTFGQGTKLEIKRSDPASGAGSGSGSAVHKESGNGHNIWVILVVTLVVPLLLVAVLIVCCCIGSGCGGDPKCMDRVCFWRLGLLRGPGAEDNAHNEILSNADSLSTFVSEQQMESQEPADLTGVTVQSPGEAQCLLGPAEAEGSQRRRLLVPANGADPTETLMLFFDKFANIVPFDSWDQLMRQLDLTKNEIDVVRAGTAGPGDALYAMLMKWVNKTGRNASIHTLLDALERMEERHAKEKIQDLLVDSGKFIYLEDGTGSAVSLESHG

SEQ ID NO: 104 - protein, 556 aa, artificial sequence
  Polypeptide encoded by pCLS27448 with BCMA - iTR10B
MALPVTALLLPLALLLHAARPGSGSGAQAAQVQLVQSGAEVKKPGASVKVSCKASGYSFPDYYINWVRQAPGQGLEWMGWIYFASGNSEYNQKFTGRVTMTRDTSSSTAYMELSSLRSEDTAVYFCASLYDYDWYFDVWGQGTMVTVSSGGGGSGGGGSGGGGSDIVMTQTPLSLSVTPGEPASISCKSSQSLVHSNGNTYLHWYLQKPGQSPQLLIYKVSNRFSGVPDRFSGSGSGADFTLKISRVEAEDVGVYYCAETSHVPWTFGQGTKLEIKRSDPASGAGSGSGSAVHKESGTKHSGEAPAVEETVTSSPGTPASPCSLSGIIIGVTVAAVVLIVAVFVCKSLLWKKVLPYLKGICSGGGGDPERVDRSSQRPGAEDNVLNEIVSILQPTQVPEQEMEVQEPAEPTGVNMLSPGESEHLLEPAEAERSQRRRLLVPANEGDPTETLRQCFDDFADLVPFDSWEPLMRKLGLMDNEIKVAKAEAAGHRDTLYTMLIKWVNKTGRDASVHTLLDALETLGERLAKQKIEDHLLSSGKFMYLEGNADSAMSSHG

SEQ ID NO: 105 - protein, 500 aa, artificial sequence
  Polypeptide encoded by pCLS27449 with BCMA - iTR10D
MALPVTALLLPLALLLHAARPGSGSGAQAAQVQLVQSGAEVKKPGASVKVSCKASGYSFPDYYINWVRQAPGQGLEWMGWIYFASGNSEYNQKFTGRVTMTRDTSSSTAYMELSSLRSEDTAVYFCASLYDYDWYFDVWGQGTMVTVSSGGGGSGGGGSGGGGSDIVMTQTPLSLSVTPGEPASISCKSSQSLVHSNGNTYLHWYLQKPGQSPQLLIYKVSNRFSGVPDRFSGSGSGADFTLKISRVEAEDVGVYYCAETSHVPWTFGQGTKLEIKRSDPASGAGSGSGSAKNESAASSTGKTPAAEETVTTILGMLASPYHYLIIIVVLVIILAVVVVGFSCRKKFISYLKGICSGGGGGPERVHRVLFRRRSCPSRVPGAEDNARNETLSNRYLQPTQVSEQEIQGQELAELTGVTVELPEEPQRLLEQAEAEGCQRRRLLVPVNDADSADISTLLDASATLEEGHAKETIQDQLVGSEKLFYEEDEAGSATSCLSHG

SEQ ID NO: 106 - protein, 430 aa, artificial sequence
  Polypeptide encoded by pCLS27450 with BCMA - iCD33
MALPVTALLLPLALLLHAARPGSGSGAQAAQVQLVQSGAEVKKPGASVKVSCKASGYSFPDYYINWVRQAPGQGLEWMGWIYFASGNSEYNQKFTGRVTMTRDTSSSTAYMELSSLRSEDTAVYFCASLYDYDWYFDVWGQGTMVTVSSGGGGSGGGGSGGGGSDIVMTQTPLSLSVTPGEPASISCKSSQSLVHSNGNTYLHWYLQKPGQSPQLLIYKVSNRFSGVPDRFSGSGSGADFTLKISRVEAEDVGVYYCAETSHVPWTFGQGTKLEIKRSDPASGAGSGSGSALNVTYVPQNPTTGIFPGDGSGKQETRAGVVHGAIGGAGVTALLALCLCLIFFIVKTHRRKAARTAVGRNDTHPTTGSASPKHQKKSKLHGPTETSSCSGAAPTVEMDEELHYASLNFHGMNPSKDTSTEYSEVRTQSHG

SEQ ID NO: 107 - protein, 391 aa, artificial sequence
  Polypeptide encoded by pCLS27451 with BCMA - iFCG2B
MALPVTALLLPLALLLHAARPGSGSGAQAAQVQLVQSGAEVKKPGASVKVSCKASGYSFPDYYINWVRQAPGQGLEWMGWIYFASGNSEYNQKFTGRVTMTRDTSSSTAYMELSSLRSEDTAVYFCASLYDYDWYFDVWGQGTMVTVSSGGGGSGGGGSGGGGSDIVMTQTPLSLSVTPGEPASISCKSSQSLVHSNGNTYLHWYLQKPGQSPQLLIYKVSNRFSGVPDRFSGSGSGADFTLKISRVEAEDVGVYYCAETSHVPWTFGQGTKLEIKRSDPASGAGSGSGSAVQAPSSSPMGIIVAVVTGIAVAAIVAAVVALIYCRKKRISALPGYPECREMGETLPEKPANPTNPDEADKVGAENTITYSLLMHPDALEEPDDQNRISHG

SEQ ID NO: 108 - protein, 432 aa, artificial sequence
  Polypeptide encoded by pCLS27452 with BCMA - iFCRL1
MALPVTALLLPLALLLHAARPGSGSGAQAAQVQLVQSGAEVKKPGASVKVSCKASGYSFPDYYINWVRQAPGQGLEWMGWIYFASGNSEYNQKFTGRVTMTRDTSSSTAYMELSSLRSEDTAVYFCASLYDYDWYFDVWGQGTMVTVSSGGGGSGGGGSGGGGSDIVMTQTPLSLSVTPGEPASISCKSSQSLVHSNGNTYLHWYLQKPGQSPQLLIYKVSNRFSGVPDRFSGSGSGADFTLKISRVEAEDVGVYYCAETSHVPWTFGQGTKLEIKRSDPASGAGSGSGSALNFTVPTGARSNHLTSGVIEGLLSTLGPATVALLFCYGLKRKIGRRSARDPLRSLPSPLPQEFTYLNSPTPGQLQPIYENVNVVSGDEVYSLAYYNQPEQESVAAETLGTHMEDKVSLDIYSRLRKANITDVDYEDAMSHG

SEQ ID NO: 109 - protein, 415 aa, artificial sequence
  Polypeptide encoded by pCLS27453 with BCMA - iFCRL2
MALPVTALLLPLALLLHAARPGSGSGAQAAQVQLVQSGAEVKKPGASVKVSCKASGYSFPDYYINWVRQAPGQGLEWMGWIYFASGNSEYNQKFTGRVTMTRDTSSSTAYMELSSLRSEDTAVYFCASLYDYDWYFDVWGQGTMVTVSSGGGGSGGGGSGGGGSDIVMTQTPLSLSVTPGEPASISCKSSQSLVHSNGNTYLHWYLQKPGQSPQLLIYKVSNRFSGVPDRFSGSGSGADFTLKISRVEAEDVGVYYCAETSHVPWTFGQGTKLEIKRSDPASGAGSGSGSAGPDGYRRDLMTAGVLWGLFGVLGFTGVALLLYALFHKISGESSATNEPRGASRPNPQEFTYSSPTPDMEELQPVYVNVGSVDVDVVYSQVWSMQQPESSANIRTLLENKDSQVIYSSVKKSSHG

SEQ ID NO: 110 - protein, 465 aa, artificial sequence
  Polypeptide encoded by pCLS27454 with BCMA - iFCRL3
MALPVTALLLPLALLLHAARPGSGSGAQAAQVQLVQSGAEVKKPGASVKVSCKASGYSFPDYYINWVRQAPGQGLEWMGWIYFASGNSEYNQKFTGRVTMTRDTSSSTAYMELSSLRSEDTAVYFCASLYDYDWYFDVWGQGTMVTVSSGGGGSGGGGSGGGGSDIVMTQTPLSLSVTPGEPASISCKSSQSLVHSNGNTYLHWYLQKPGQSPQLLIYKVSNRFSGVPDRFSGSGSGADFTLKISRVEAEDVGVYYCAETSHVPWTFGQGTKLEIKRSDPASGAGSGSGSAGTSRNRTGLTAAGITGLVLSILVLAAAAALLHYARARRKPGGLSATGTSSHSPSECQEPSSSRPSRIDPQEPTHSKPLAPMELEPMYSNANPGDSNPIYSQIWSIQHTKENSANCPMMHQEHEELTVLYSELKKTHPDDSAGEASSRGRAHEEDDEENYENVPRVLLASDHSHG

SEQ ID NO: 111 - protein, 435 aa, artificial sequence
  Polypeptide encoded by pCLS27455 with BCMA - iFCRL4
MALPVTALLLPLALLLHAARPGSGSGAQAAQVQLVQSGAEVKKPGASVKVSCKASGYSFPDYYINWVRQAPGQGLEWMGWIYFASGNSEYNQKFTGRVTMTRDTSSSTAYMELSSLRSEDTAVYFCASLYDYDWYFDVWGQGTMVTVSSGGGGSGGGGSGGGGSDIVMTQTPLSLSVTPGEPASISCKSSQSLVHSNGNTYLHWYLQKPGQSPQLLIYKVSNRFSGVPDRFSGSGSGADFTLKISRVEAEDVGVYYCAETSHVPWTFGQGTKLEIKRSDPASGAGSGSGSAVTVRETPGNRDGLVAAGATGGLLSALLLAVALLFHCWRRRKSGVGFLGDETRLPPAPGPGESSHSICPAQVELQSLYVDVHPKKGDLVYSEIQTTQLGEEEEANTSRTLLEDKDVSVVYSEVKTQHPDNSAGKISSKDEESSHG

SEQ ID NO: 112 - protein, 437 aa, artificial sequence
  Polypeptide encoded by pCLS27456 with BCMA - iFCRL5
MALPVTALLLPLALLLHAARPGSGSGAQAAQVQLVQSGAEVKKPGASVKVSCKASGYSFPDYYINWVRQAPGQGLEWMGWIYFASGNSEYNQKFTGRVTMTRDTSSSTAYMELSSLRSEDTAVYFCASLYDYDWYFDVWGQGTMVTVSSGGGGSGGGGSGGGGSDIVMTQTPLSLSVTPGEPASISCKSSQSLVHSNGNTYLHWYLQKPGQSPQLLIYKVSNRFSGVPDRFSGSGSGADFTLKISRVEAEDVGVYYCAETSHVPWTFGQGTKLEIKRSDPASGAGSGSGSALYITGLTANRSGPFATGVAGGLLSIAGLAAGALLLYCWLSRKAGRKPASDPARSPPDSDSQEPTYHNVPAWEELQPVYTNANPRGENVVYSEVRIIQEKKKHAVASDPRHLRNKGSPIIYSEVKVASTPVSGSLFLASSAPHRSHG

SEQ ID NO: 113 - protein, 473 aa, artificial sequence
  Polypeptide encoded by CLS27457 with BCMA - iLIRB2
MALPVTALLLPLALLLHAARPGSGSGAQAAQVQLVQSGAEVKKPGASVKVSCKASGYSFPDYYINWVRQAPGQGLEWMGWIYFASGNSEYNQKFTGRVTMTRDTSSSTAYMELSSLRSEDTAVYFCASLYDYDWYFDVWGQGTMVTVSSGGGGSGGGGSGGGGSDIVMTQTPLSLSVTPGEPASISCKSSQSLVHSNGNTYLHWYLQKPGQSPQLLIYKVSNRFSGVPDRFSGSGSGADFTLKISRVEAEDVGVYYCAETSHVPWTFGQGTKLEIKRSDPASGAGSGSGSAGPSMGSSPPPTGPISTPAGPEDQPLTPTGSDPQSGLGRHLGVVIGILVAVVLLLLLLLLLFLILRHRRQGKHWTSTQRKADFQHPAGAVGPEPTDRGLQWRSSPAADAQEENLYAAVKDTQPEDGVEMDTRAAASEAPQDVTYAQLHSLTLRRKATEPPPSQEREPPAEPSIYATLAIHSHG

SEQ ID NO: 114 - protein, 506 aa, artificial sequence
  Polypeptide encoded by pCLS27445 with BCMA - iLIRB3
MALPVTALLLPLALLLHAARPGSGSGAQAAQVQLVQSGAEVKKPGASVKVSCKASGYSFPDYYINWVRQAPGQGLEWMGWIYFASGNSEYNQKFTGRVTMTRDTSSSTAYMELSSLRSEDTAVYFCASLYDYDWYFDVWGQGTMVTVSSGGGGSGGGGSGGGGSDIVMTQTPLSLSVTPGEPASISCKSSQSLVHSNGNTYLHWYLQKPGQSPQLLIYKVSNRFSGVPDRFSGSGSGADFTLKISRVEAEDVGVYYCAETSHVPWTFGQGTKLEIKRSDPASGAGSGSGSAGHSGGSSLPPTGPPSTPGLGRYLEVLIGVSVAFVLLLFLLLFLLLRRQRHSKHRTSDQRKTDFQRPAGAAETEPKDRGLLRRSSPAADVQEENLYAAVKDTQSEDRVELDSQSPHDEDPQAVTYAPVKHSSPRREMASPPSSLSGEFLDTKDRQVEEDRQMDTEAAASEASQDVTYAQLHSLTLRRKATEPPPSQEGEPPAEPSIYATLAIHSHG

SEQ ID NO: 115 - protein, 524 aa, artificial sequence
  Polypeptide encoded by pCLS27458 with BCMA - iLIRB4
MALPVTALLLPLALLLHAARPGSGSGAQAAQVQLVQSGAEVKKPGASVKVSCKASGYSFPDYYINWVRQAPGQGLEWMGWIYFASGNSEYNQKFTGRVTMTRDTSSSTAYMELSSLRSEDTAVYFCASLYDYDWYFDVWGQGTMVTVSSGGGGSGGGGSGGGGSDIVMTQTPLSLSVTPGEPASISCKSSQSLVHSNGNTYLHWYLQKPGQSPQLLIYKVSNRFSGVPDRFSGSGSGADFTLKISRVEAEDVGVYYCAETSHVPWTFGQGTKLEIKRSDPASGAGSGSGSAGSLEGPRPSPTRSVSTAAGPEDQPLMPTGSVPHSGLRRHWEVLIGVLVVSILLLSLLLFLLLQHWRQGKHRTLAQRQADFQRPPGAAEPEPKDGGLQRRSSPAADVQGENFCAAVKNTQPEDGVEMDTRQSPHDEDPQAVTYAKVKHSRPRREMASPPSPLSGEFLDTKDRQAEEDRQMDTEAAASEAPQDVTYAQLHSFTLRQKATEPPPSQEGASPAEPSVYATLAIHSHG

SEQ ID NO: 116 - protein, 466 aa, artificial sequence
  Polypeptide encoded by pCLS27459 with BCMA - iLIRB5
MALPVTALLLPLALLLHAARPGSGSGAQAAQVQLVQSGAEVKKPGASVKVSCKASGYSFPDYYINWVRQAPGQGLEWMGWIYFASGNSEYNQKFTGRVTMTRDTSSSTAYMELSSLRSEDTAVYFCASLYDYDWYFDVWGQGTMVTVSSGGGGSGGGGSGGGGSDIVMTQTPLSLSVTPGEPASISCKSSQSLVHSNGNTYLHWYLQKPGQSPQLLIYKVSNRFSGVPDRFSGSGSGADFTLKISRVEAEDVGVYYCAETSHVPWTFGQGTKLEIKRSDPASGAGSGSGSAGPSGDPSLSPTGSTPTPGPEDQPLTPTGLDPQSGLGRHLGVVTGVSVAFVLLLFLLLFLLLRHRHQSKHRTSAHFYRPAGAAGPEPKDQGLQKRASPVADIQEEILNAAVKDTQPKDGVEMDARAAASEAPQDVTYAQLHSLTLRREATEPPPSQEREPPAEPSIYAPLAIHSHG

SEQ ID NO: 117 - protein, 424 aa, artificial sequence
  Polypeptide encoded by pCLS27460  with BCMA - iMILR1
MALPVTALLLPLALLLHAARPGSGSGAQAAQVQLVQSGAEVKKPGASVKVSCKASGYSFPDYYINWVRQAPGQGLEWMGWIYFASGNSEYNQKFTGRVTMTRDTSSSTAYMELSSLRSEDTAVYFCASLYDYDWYFDVWGQGTMVTVSSGGGGSGGGGSGGGGSDIVMTQTPLSLSVTPGEPASISCKSSQSLVHSNGNTYLHWYLQKPGQSPQLLIYKVSNRFSGVPDRFSGSGSGADFTLKISRVEAEDVGVYYCAETSHVPWTFGQGTKLEIKRSDPASGAGSGSGSAMPSTGGDSCPFCLKLLLPGLLLLLVVIILILAFWVLPKYKTRKAMRNNVPRDRGDTAMEVGIYANILEKQAKEESVPEVGSRPCVSTAQDEAKHSQELQYATPVFQEVAPREQEACDSYKSGYVYSELNFSHG

SEQ ID NO: 118 - protein, 417 aa, artificial sequence
  Polypeptide encoded by pCLS27461  with BCMA - iMPZL1
MALPVTALLLPLALLLHAARPGSGSGAQAAQVQLVQSGAEVKKPGASVKVSCKASGYSFPDYYINWVRQAPGQGLEWMGWIYFASGNSEYNQKFTGRVTMTRDTSSSTAYMELSSLRSEDTAVYFCASLYDYDWYFDVWGQGTMVTVSSGGGGSGGGGSGGGGSDIVMTQTPLSLSVTPGEPASISCKSSQSLVHSNGNTYLHWYLQKPGQSPQLLIYKVSNRFSGVPDRFSGSGSGADFTLKISRVEAEDVGVYYCAETSHVPWTFGQGTKLEIKRSDPASGAGSGSGSAPGHIRLYVVEKENLPVFPVWVVVGIVTAVVLGLTLLISMILAVLYRRKNSKRDYTGCSTSESLSPVKQAPRKSPSDTEGLVKSLPSGSHQGPVIYAQLDHSGGHHSDKINKSESVVYADIRKNSHG

SEQ ID NO: 119 - protein, 447 aa, artificial sequence
  Polypeptide encoded by pCLS27462  with BCMA - iPILRA
MALPVTALLLPLALLLHAARPGSGSGAQAAQVQLVQSGAEVKKPGASVKVSCKASGYSFPDYYINWVRQAPGQGLEWMGWIYFASGNSEYNQKFTGRVTMTRDTSSSTAYMELSSLRSEDTAVYFCASLYDYDWYFDVWGQGTMVTVSSGGGGSGGGGSGGGGSDIVMTQTPLSLSVTPGEPASISCKSSQSLVHSNGNTYLHWYLQKPGQSPQLLIYKVSNRFSGVPDRFSGSGSGADFTLKISRVEAEDVGVYYCAETSHVPWTFGQGTKLEIKRSDPASGAGSGSGSAQAVTTTTQRPSSMTTTWRLSSTTTTTGLRVTQGKRRSDSWHISLETAVGVAVAVTVLGIMILGLICLLRWRRRKGQQRTKATTPAREPFQNTEEPYENIRNEGQNTDPKLNPKDDGIVYASLALSSSTSPKAPPSHRPLKSPQNETLYSVLKASHG

SEQ ID NO: 120 - protein, 383 aa, artificial sequence
  Polypeptide encoded by pCLS27464 with BCMA - iPVR
MALPVTALLLPLALLLHAARPGSGSGAQAAQVQLVQSGAEVKKPGASVKVSCKASGYSFPDYYINWVRQAPGQGLEWMGWIYFASGNSEYNQKFTGRVTMTRDTSSSTAYMELSSLRSEDTAVYFCASLYDYDWYFDVWGQGTMVTVSSGGGGSGGGGSGGGGSDIVMTQTPLSLSVTPGEPASISCKSSQSLVHSNGNTYLHWYLQKPGQSPQLLIYKVSNRFSGVPDRFSGSGSGADFTLKISRVEAEDVGVYYCAETSHVPWTFGQGTKLEIKRSDPASGAGSGSGSAVKEGPPSEHSGISRNAIIFLVLGILVFLILLGIGIYFYWSKCSREVLWHCHLCPSSTEHASASANGHVSYSAVSRENSSSQDPQTEGTRSHG

SEQ ID NO: 121 - protein, 550 aa, artificial sequence
  Polypeptide encoded by pCLS27465 with BCMA - iSIG10
MALPVTALLLPLALLLHAARPGSGSGAQAAQVQLVQSGAEVKKPGASVKVSCKASGYSFPDYYINWVRQAPGQGLEWMGWIYFASGNSEYNQKFTGRVTMTRDTSSSTAYMELSSLRSEDTAVYFCASLYDYDWYFDVWGQGTMVTVSSGGGGSGGGGSGGGGSDIVMTQTPLSLSVTPGEPASISCKSSQSLVHSNGNTYLHWYLQKPGQSPQLLIYKVSNRFSGVPDRFSGSGSGADFTLKISRVEAEDVGVYYCAETSHVPWTFGQGTKLEIKRSDPASGAGSGSGSAVHYSPKLLGPSCSWEAEGLHCSCSSQASPAPSLRWWLGEELLEGNSSQDSFEVTPSSAGPWANSSLSLHGGLSSGLRLRCEAWNVHGAQSGSILQLPDKKGLISTAFSNGAFLGIGITALLFLCLALIIMKILPKRRTQTETPRPRFSRHSTILDYINVVPTAGPLAQKRNQKATPNSPRTPLPPGAPSPESKKNQKKQYQLPSFPEPKSSTQAPESQESQEELHYATLNFPGVRPRPEARMPKGTQADYAEVKFQSHG

SEQ ID NO: 122 - protein, 540 aa, artificial sequence
  Polypeptide encoded by pCLS27466 with BCMA - iSIG11
MALPVTALLLPLALLLHAARPGSGSGAQAAQVQLVQSGAEVKKPGASVKVSCKASGYSFPDYYINWVRQAPGQGLEWMGWIYFASGNSEYNQKFTGRVTMTRDTSSSTAYMELSSLRSEDTAVYFCASLYDYDWYFDVWGQGTMVTVSSGGGGSGGGGSGGGGSDIVMTQTPLSLSVTPGEPASISCKSSQSLVHSNGNTYLHWYLQKPGQSPQLLIYKVSNRFSGVPDRFSGSGSGADFTLKISRVEAEDVGVYYCAETSHVPWTFGQGTKLEIKRSDPASGAGSGSGSAVHYPPQLLGPSCSWEAEGLHCSCSSQASPAPSLRWWLGEELLEGNSSQGSFEVTPSSAGPWANSSLSLHGGLSSGLRLRCKAWNVHGAQSGSVFQLLPGKLEHGGGLGLGAALGAGVAALLAFCSCLVVFRVKICRKEARKRAAAEQDVPSTLGPISQGHQHECSAGSSQDHPPPGAATYTPGKGEEQELHYASLSFQGLRLWEPADQEAPSTTEYSEIKIHTGQPLRGPGFGLQLEREMSGMVPKSHG

SEQ ID NO: 123 - protein, 427 aa, artificial sequence
  Polypeptide encoded by pCLS27467 with BCMA - iSIG12
MALPVTALLLPLALLLHAARPGSGSGAQAAQVQLVQSGAEVKKPGASVKVSCKASGYSFPDYYINWVRQAPGQGLEWMGWIYFASGNSEYNQKFTGRVTMTRDTSSSTAYMELSSLRSEDTAVYFCASLYDYDWYFDVWGQGTMVTVSSGGGGSGGGGSGGGGSDIVMTQTPLSLSVTPGEPASISCKSSQSLVHSNGNTYLHWYLQKPGQSPQLLIYKVSNRFSGVPDRFSGSGSGADFTLKISRVEAEDVGVYYCAETSHVPWTFGQGTKLEIKRSDPASGAGSGSGSALQNEYTGKMRPISGVTLGAFGGAGATALVFLYFCIIFVVVRSCRKKSARPAVGVGDTGMEDANAVRGSASQGPLIESPADDSPPHHAPPALATPSPEEGEIQYASLSFHKARPQYPQEQEAIGYEYSEINIPKSHG

SEQ ID NO: 124 - protein, 515 aa, artificial sequence
  Polypeptide encoded by pCLS27468 with BCMA - iSIGL5
MALPVTALLLPLALLLHAARPGSGSGAQAAQVQLVQSGAEVKKPGASVKVSCKASGYSFPDYYINWVRQAPGQGLEWMGWIYFASGNSEYNQKFTGRVTMTRDTSSSTAYMELSSLRSEDTAVYFCASLYDYDWYFDVWGQGTMVTVSSGGGGSGGGGSGGGGSDIVMTQTPLSLSVTPGEPASISCKSSQSLVHSNGNTYLHWYLQKPGQSPQLLIYKVSNRFSGVPDRFSGSGSGADFTLKISRVEAEDVGVYYCAETSHVPWTFGQGTKLEIKRSDPASGAGSGSGSAVYSLPQLLGPSCSWEAEGLHCRCSFRAWPAPSLCWRLEEKPLEGNSSQGSFKVNSSSPGPWANSSLILHGGLNSDLKVSCKAWNIYGSQSGSVLLLQGRSNLGTGVVPAALGGAGVMALLCICLCLIFFLIVKARRKQAAGRPEKMDDEDPIMGTITSGSRKKPWPDSPGDQASPPGDAPPLEEQKELHYASLSFSEMKSREPKDQEAPSTTEYSEIKTSKSHG

SEQ ID NO: 125 - protein, 414 aa, artificial sequence
  Polypeptide encoded by pCLS27469 with BCMA - iSIGL6
MALPVTALLLPLALLLHAARPGSGSGAQAAQVQLVQSGAEVKKPGASVKVSCKASGYSFPDYYINWVRQAPGQGLEWMGWIYFASGNSEYNQKFTGRVTMTRDTSSSTAYMELSSLRSEDTAVYFCASLYDYDWYFDVWGQGTMVTVSSGGGGSGGGGSGGGGSDIVMTQTPLSLSVTPGEPASISCKSSQSLVHSNGNTYLHWYLQKPGQSPQLLIYKVSNRFSGVPDRFSGSGSGADFTLKISRVEAEDVGVYYCAETSHVPWTFGQGTKLEIKRSDPASGAGSGSGSALFVHWKPEGRAGGVLGAVWGASITTLVFLCVCFIFRVKTRRKKAAQPVQNTDDVNPVMVSGSRGHQHQFQTGIVSDHPAEAGPISEDEQELHYAVLHFHKVQPQEPKVTDTEYSEIKIHKSHG

SEQ ID NO: 126 - protein, 425 aa, artificial sequence
  Polypeptide encoded by pCLS27470 with BCMA - iSIGL7
MALPVTALLLPLALLLHAARPGSGSGAQAAQVQLVQSGAEVKKPGASVKVSCKASGYSFPDYYINWVRQAPGQGLEWMGWIYFASGNSEYNQKFTGRVTMTRDTSSSTAYMELSSLRSEDTAVYFCASLYDYDWYFDVWGQGTMVTVSSGGGGSGGGGSGGGGSDIVMTQTPLSLSVTPGEPASISCKSSQSLVHSNGNTYLHWYLQKPGQSPQLLIYKVSNRFSGVPDRFSGSGSGADFTLKISRVEAEDVGVYYCAETSHVPWTFGQGTKLEIKRSDPASGAGSGSGSALQQEYTGKMRPVSGVLLGAVGGAGATALVFLSFCVIFIVVRSCRKKSARPAADVGDIGMKDANTIRGSASQGNLTESWADDNPRHHGLAAHSSGEEREIQYAPLSFHKGEPQDLSGQEATNNEYSEIKIPKSHG

SEQ ID NO: 127 - protein, 449 aa, artificial sequence
  Polypeptide encoded by pCLS27471 with BCMA - iSIGL8
MALPVTALLLPLALLLHAARPGSGSGAQAAQVQLVQSGAEVKKPGASVKVSCKASGYSFPDYYINWVRQAPGQGLEWMGWIYFASGNSEYNQKFTGRVTMTRDTSSSTAYMELSSLRSEDTAVYFCASLYDYDWYFDVWGQGTMVTVSSGGGGSGGGGSGGGGSDIVMTQTPLSLSVTPGEPASISCKSSQSLVHSNGNTYLHWYLQKPGQSPQLLIYKVSNRFSGVPDRFSGSGSGADFTLKISRVEAEDVGVYYCAETSHVPWTFGQGTKLEIKRSDPASGAGSGSGSALQNEGTGTSRPVSQVTLAAVGGAGATALAFLSFCIIFIIVRSCRKKSARPAAGVGDTGMEDAKAIRGSASQGPLTESWKDGNPLKKPPPAVAPSSGEEGELHYATLSFHKVKPQDPQGQEATDSEYSEIKIHKRETAETQACLRNHNPSSKEVRGSHG

SEQ ID NO: 128 - protein, 421 aa, artificial sequence
  Polypeptide encoded by pCLS27472B with CMA - iSIGL9
MALPVTALLLPLALLLHAARPGSGSGAQAAQVQLVQSGAEVKKPGASVKVSCKASGYSFPDYYINWVRQAPGQGLEWMGWIYFASGNSEYNQKFTGRVTMTRDTSSSTAYMELSSLRSEDTAVYFCASLYDYDWYFDVWGQGTMVTVSSGGGGSGGGGSGGGGSDIVMTQTPLSLSVTPGEPASISCKSSQSLVHSNGNTYLHWYLQKPGQSPQLLIYKVSNRFSGVPDRFSGSGSGADFTLKISRVEAEDVGVYYCAETSHVPWTFGQGTKLEIKRSDPASGAGSGSGSALQSKATSGVTQGVVGGAGATALVFLSFCVIFVVVRSCRKKSARPAAGVGDTGIEDANAVRGSASQGPLTEPWAEDSPPDQPPPASARSSVGEGELQYASLSFQMVKPWDSRGQEATDTEYSEIKIHRSHG

SEQ ID NO: 129 - protein, 437 aa, artificial sequence
  Polypeptide encoded by pCLS27473 with BCMA - iKI2L1
MALPVTALLLPLALLLHAARPGSGSGAQAAQVQLVQSGAEVKKPGASVKVSCKASGYSFPDYYINWVRQAPGQGLEWMGWIYFASGNSEYNQKFTGRVTMTRDTSSSTAYMELSSLRSEDTAVYFCASLYDYDWYFDVWGQGTMVTVSSGGGGSGGGGSGGGGSDIVMTQTPLSLSVTPGEPASISCKSSQSLVHSNGNTYLHWYLQKPGQSPQLLIYKVSNRFSGVPDRFSGSGSGADFTLKISRVEAEDVGVYYCAETSHVPWTFGQGTKLEIKRSDPASGAGSGSGSAPYEWSKSSDPLLVSVTGNPSNSWPSPTEPSSKTGNPRHLHILIGTSVVIILFILLFFLLHRWCSNKKNAAVMDQESAGNRTANSEDSDEQDPQEVTYTQLNHCVFTQRKITRPSQRPKTPPTDIIVYTELPNAESRSKVVSCPSHG

SEQ ID NO: 130 - protein, 437 aa, artificial sequence
  Polypeptide encoded by pCLS27474 with BCMA - iKI2L2
MALPVTALLLPLALLLHAARPGSGSGAQAAQVQLVQSGAEVKKPGASVKVSCKASGYSFPDYYINWVRQAPGQGLEWMGWIYFASGNSEYNQKFTGRVTMTRDTSSSTAYMELSSLRSEDTAVYFCASLYDYDWYFDVWGQGTMVTVSSGGGGSGGGGSGGGGSDIVMTQTPLSLSVTPGEPASISCKSSQSLVHSNGNTYLHWYLQKPGQSPQLLIYKVSNRFSGVPDRFSGSGSGADFTLKISRVEAEDVGVYYCAETSHVPWTFGQGTKLEIKRSDPASGAGSGSGSAPYEWSNSSDPLLVSVIGNPSNSWPSPTEPSSKTGNPRHLHILIGTSVVIILFILLFFLLHRWCSNKKNAAVMDQESAGNRTANSEDSDEQDPQEVTYTQLNHCVFTQRKITRPSQRPKTPPTDIIVYAELPNAESRSKVVSCPSHG

SEQ ID NO: 131 - protein, 430 aa, artificial sequence
  Polypeptide encoded by pCLS27475 with BCMA - iKI2L3
MALPVTALLLPLALLLHAARPGSGSGAQAAQVQLVQSGAEVKKPGASVKVSCKASGYSFPDYYINWVRQAPGQGLEWMGWIYFASGNSEYNQKFTGRVTMTRDTSSSTAYMELSSLRSEDTAVYFCASLYDYDWYFDVWGQGTMVTVSSGGGGSGGGGSGGGGSDIVMTQTPLSLSVTPGEPASISCKSSQSLVHSNGNTYLHWYLQKPGQSPQLLIYKVSNRFSGVPDRFSGSGSGADFTLKISRVEAEDVGVYYCAETSHVPWTFGQGTKLEIKRSDPASGAGSGSGSAPYEWSNSSDPLLVSVTGNPSNSWPSPTEPSSETGNPRHLHVLIGTSVVIILFILLLFFLLHRWCCNKKNAVVMDQEPAGNRTVNREDSDEQDPQEVTYAQLNHCVFTQRKITRPSQRPKTPPTDIIVYTELPNAEPSHG

SEQ ID NO: 132 - protein, 469 aa, artificial sequence
  Polypeptide encoded by pCLS27476 with BCMA - iKI2L4
MALPVTALLLPLALLLHAARPGSGSGAQAAQVQLVQSGAEVKKPGASVKVSCKASGYSFPDYYINWVRQAPGQGLEWMGWIYFASGNSEYNQKFTGRVTMTRDTSSSTAYMELSSLRSEDTAVYFCASLYDYDWYFDVWGQGTMVTVSSGGGGSGGGGSGGGGSDIVMTQTPLSLSVTPGEPASISCKSSQSLVHSNGNTYLHWYLQKPGQSPQLLIYKVSNRFSGVPDRFSGSGSGADFTLKISRVEAEDVGVYYCAETSHVPWTFGQGTKLEIKRSDPASGAGSGSGSAPYEWSDASDPLPVSVTGNPSSSWPSPTEPSFKTGIARHLHAVIRYSVAIILFTILPFFLLHRWCSKKKDAAVMNQEPAGHRTVNREDSDEQDPQEVTYAQLDHCIFTQRKITGPSQRSKRPSTDTSVCIELPNAEPRALSPAHEHHSQALMGSSRETTALSQTQLASSHVPAAGISHG

SEQ ID NO: 133 - protein, 469 aa, artificial sequence
  Polypeptide encoded by pCLS27477 with BCMA - iKI2LA
MALPVTALLLPLALLLHAARPGSGSGAQAAQVQLVQSGAEVKKPGASVKVSCKASGYSFPDYYINWVRQAPGQGLEWMGWIYFASGNSEYNQKFTGRVTMTRDTSSSTAYMELSSLRSEDTAVYFCASLYDYDWYFDVWGQGTMVTVSSGGGGSGGGGSGGGGSDIVMTQTPLSLSVTPGEPASISCKSSQSLVHSNGNTYLHWYLQKPGQSPQLLIYKVSNRFSGVPDRFSGSGSGADFTLKISRVEAEDVGVYYCAETSHVPWTFGQGTKLEIKRSDPASGAGSGSGSAPYEWSDPSDPLLVSVTGNSSSSSSSPTEPSSKTGIRRHLHILIGTSVAIILFIILFFFLLHCCCSNKKNAAVMDQEPAGDRTVNREDSDDQDPQEVTYAQLDHCVFTQTKITSPSQRPKTPPTDTTMYMELPNAKPRSLSPAHKHHSQALRGSSRETTALSQNRVASSHVPAAGISHG

SEQ ID NO: 134 - protein, 438 aa, artificial sequence
  Polypeptide encoded by pCLS27478 with BCMA - iKI3L1
MALPVTALLLPLALLLHAARPGSGSGAQAAQVQLVQSGAEVKKPGASVKVSCKASGYSFPDYYINWVRQAPGQGLEWMGWIYFASGNSEYNQKFTGRVTMTRDTSSSTAYMELSSLRSEDTAVYFCASLYDYDWYFDVWGQGTMVTVSSGGGGSGGGGSGGGGSDIVMTQTPLSLSVTPGEPASISCKSSQSLVHSNGNTYLHWYLQKPGQSPQLLIYKVSNRFSGVPDRFSGSGSGADFTLKISRVEAEDVGVYYCAETSHVPWTFGQGTKLEIKRSDPASGAGSGSGSAPYEWSDPSDPLLVSVTGNPSSSWPSPTEPSSKSGNPRHLHILIGTSVVIILFILLLFFLLHLWCSNKKNAAVMDQEPAGNRTANSEDSDEQDPEEVTYAQLDHCVFTQRKITRPSQRPKTPPTDTILYTELPNAKPRSKVVSCPSHG

SEQ ID NO: 135 - protein, 449 aa, artificial sequence
  Polypeptide encoded by pCLS27479 with BCMA - iKI3L2
MALPVTALLLPLALLLHAARPGSGSGAQAAQVQLVQSGAEVKKPGASVKVSCKASGYSFPDYYINWVRQAPGQGLEWMGWIYFASGNSEYNQKFTGRVTMTRDTSSSTAYMELSSLRSEDTAVYFCASLYDYDWYFDVWGQGTMVTVSSGGGGSGGGGSGGGGSDIVMTQTPLSLSVTPGEPASISCKSSQSLVHSNGNTYLHWYLQKPGQSPQLLIYKVSNRFSGVPDRFSGSGSGADFTLKISRVEAEDVGVYYCAETSHVPWTFGQGTKLEIKRSDPASGAGSGSGSAPCVWSNSSDPLLVSVTGNPSSSWPSPTEPSSKSGICRHLHVLIGTSVVIFLFILLLFFLLYRWCSNKKNAAVMDQEPAGDRTVNRQDSDEQDPQEVTYAQLDHCVFIQRKISRPSQRPKTPLTDTSVYTELPNAEPRSKVVSCPRAPQSGLEGVFSHG

SEQ ID NO: 136 - protein, 409 aa, artificial sequence
  Polypeptide encoded by pCLS27480 with BCMA - iKI3L3
MALPVTALLLPLALLLHAARPGSGSGAQAAQVQLVQSGAEVKKPGASVKVSCKASGYSFPDYYINWVRQAPGQGLEWMGWIYFASGNSEYNQKFTGRVTMTRDTSSSTAYMELSSLRSEDTAVYFCASLYDYDWYFDVWGQGTMVTVSSGGGGSGGGGSGGGGSDIVMTQTPLSLSVTPGEPASISCKSSQSLVHSNGNTYLHWYLQKPGQSPQLLIYKVSNRFSGVPDRFSGSGSGADFTLKISRVEAEDVGVYYCAETSHVPWTFGQGTKLEIKRSDPASGAGSGSGSASFRALPHAWSDPSDPLPVSVTGNSRYLHALIGTSVVIIPFAILLFFLLHRWCANKKNAVVMDQEPAGNRTVNREDSDEQDPQEVTYAQLNHCVFTQRKITRPSQRPKTPPTDTSVSHG

SEQ ID NO: 137 - protein, 441 aa, artificial sequence
  Polypeptide encoded by pCLS27481 with BCMA - iPECA1
MALPVTALLLPLALLLHAARPGSGSGAQAAQVQLVQSGAEVKKPGASVKVSCKASGYSFPDYYINWVRQAPGQGLEWMGWIYFASGNSEYNQKFTGRVTMTRDTSSSTAYMELSSLRSEDTAVYFCASLYDYDWYFDVWGQGTMVTVSSGGGGSGGGGSGGGGSDIVMTQTPLSLSVTPGEPASISCKSSQSLVHSNGNTYLHWYLQKPGQSPQLLIYKVSNRFSGVPDRFSGSGSGADFTLKISRVEAEDVGVYYCAETSHVPWTFGQGTKLEIKRSDPASGAGSGSGSAVRVILAPWKKGLIAVVIIGVIIALLIIAAKCYFLRKAKAKQMPVEMSRPAVPLLNSNNEKMSDPNMEANSHYGHNDDVGNHAMKPINDNKEPLNSDVQYTEVQVSSAESHKDLGKKDTETVYSEVRKAVPDAVESRYSRTEGSLDGTSHG

SEQ ID NO: 138 - protein, 432 aa, artificial sequence
  Polypeptide encoded by pCLS27500 with PSMA - iPDCD1
MALPVTALLLPLALLLHAARPGSGSGAQAAEVQLQQSGPELVKPGTSVRISCKTSGYTFTEYTIHWVKQSHGKSLEWIGNINPNNGGTTYNQKFEDKATLTVDKSSSTAYMELRSLTSEDSAVYYCAAGWNFDYWGQGTTVTVSSGGGGSGGGGSGGGGSDIVMTQSHKFMSTSVGDRVSIICKASQDVGTAVDWYQQKPGQSPKLLIYWASTRHTGVPDRFTGSGSGTDFTLTITNVQSEDLADYFCQQYNSYPLTFGAGTMLDLKRAAARSDPASGAGSGSGSAERRAEVPTAHPSPSPRPAGQFQTLVVGVVGGLLGSLVLLVWVLAVICSRAARGTIGARRTGQPLKEDPSAVPVFSVDYGELDFQWREKTPEPPVPCVPEQTEYATIVFPSGMGTSSPARRGSADGPRSAQPLRPEDGHCSWPLSHG

SEQ ID NO: 139 - protein, 405 aa, artificial sequence
  Polypeptide encoded by pCLS27422 with PSMA - iPD1 -v2
MALPVTALLLPLALLLHAEVQLQQSGPELVKPGTSVRISCKTSGYTFTEYTIHWVKQSHGKSLEWIGNINPNNGGTTYNQKFEDKATLTVDKSSSTAYMELRSLTSEDSAVYYCAAGWNFDYWGQGTTVTVSSGGGGSGGGGSGGGGSDIVMTQSHKFMSTSVGDRVSIICKASQDVGTAVDWYQQKPGQSPKLLIYWASTRHTGVPDRFTGSGSGTDFTLTITNVQSEDLADYFCQQYNSYPLTFGAGTMLDLKRAAATERRAEVPTAHPSPSPRPAGQFQTLVVGVVGGLLGSLVLLVWVLAVICSRAARGTIGARRTGQPLKEDPSAVPVFSVDYGELDFQWREKTPEPPVPCVPEQTEYATIVFPSGMGTSSPARRGSADGPRSAQPLRPEDGHCSWPLSH

SEQ ID NO: 140 - protein, 386 aa, artificial sequence
  Polypeptide encoded by pCLS27482 with PSMA - iCD200R
MALPVTALLLPLALLLHAARPGSGSGAQAAEVQLQQSGPELVKPGTSVRISCKTSGYTFTEYTIHWVKQSHGKSLEWIGNINPNNGGTTYNQKFEDKATLTVDKSSSTAYMELRSLTSEDSAVYYCAAGWNFDYWGQGTTVTVSSGGGGSGGGGSGGGGSDIVMTQSHKFMSTSVGDRVSIICKASQDVGTAVDWYQQKPGQSPKLLIYWASTRHTGVPDRFTGSGSGTDFTLTITNVQSEDLADYFCQQYNSYPLTFGAGTMLDLKRAAARSDPASGAGSGSGSAIELLPVPGAKKSAKLYIPYIILTIIILTIVGFIWLLKVNGCRKYKLNKTESTPVVEEDEMQPYASYTEKNNPLYDTTNKVKASEALQSEVDTDLHTLSHG

SEQ ID NO: 141 - protein, 528 aa, artificial sequence
  Polypeptide encoded by pCLS27483 with PSMA - iTR10A
MALPVTALLLPLALLLHAARPGSGSGAQAAEVQLQQSGPELVKPGTSVRISCKTSGYTFTEYTIHWVKQSHGKSLEWIGNINPNNGGTTYNQKFEDKATLTVDKSSSTAYMELRSLTSEDSAVYYCAAGWNFDYWGQGTTVTVSSGGGGSGGGGSGGGGSDIVMTQSHKFMSTSVGDRVSIICKASQDVGTAVDWYQQKPGQSPKLLIYWASTRHTGVPDRFTGSGSGTDFTLTITNVQSEDLADYFCQQYNSYPLTFGAGTMLDLKRAAARSDPASGAGSGSGSAVHKESGNGHNIWVILVVTLVVPLLLVAVLIVCCCIGSGCGGDPKCMDRVCFWRLGLLRGPGAEDNAHNEILSNADSLSTFVSEQQMESQEPADLTGVTVQSPGEAQCLLGPAEAEGSQRRRLLVPANGADPTETLMLFFDKFANIVPFDSWDQLMRQLDLTKNEIDVVRAGTAGPGDALYAMLMKWVNKTGRNASIHTLLDALERMEERHAKEKIQDLLVDSGKFIYLEDGTGSAVSLESHG

SEQ ID NO: 142 - protein, 551 aa, artificial sequence
  Polypeptide encoded by pCLS27484 with PSMA - iTR10B
MALPVTALLLPLALLLHAARPGSGSGAQAAEVQLQQSGPELVKPGTSVRISCKTSGYTFTEYTIHWVKQSHGKSLEWIGNINPNNGGTTYNQKFEDKATLTVDKSSSTAYMELRSLTSEDSAVYYCAAGWNFDYWGQGTTVTVSSGGGGSGGGGSGGGGSDIVMTQSHKFMSTSVGDRVSIICKASQDVGTAVDWYQQKPGQSPKLLIYWASTRHTGVPDRFTGSGSGTDFTLTITNVQSEDLADYFCQQYNSYPLTFGAGTMLDLKRAAARSDPASGAGSGSGSAVHKESGTKHSGEAPAVEETVTSSPGTPASPCSLSGIIIGVTVAAVVLIVAVFVCKSLLWKKVLPYLKGICSGGGGDPERVDRSSQRPGAEDNVLNEIVSILQPTQVPEQEMEVQEPAEPTGVNMLSPGESEHLLEPAEAERSQRRRLLVPANEGDPTETLRQCFDDFADLVPFDSWEPLMRKLGLMDNEIKVAKAEAAGHRDTLYTMLIKWVNKTGRDASVHTLLDALETLGERLAKQKIEDHLLSSGKFMYLEGNADSAMSSHG

SEQ ID NO: 143 - protein, 495 aa, artificial sequence
  Polypeptide encoded by pCLS27485 with PSMA - iTR10D
MALPVTALLLPLALLLHAARPGSGSGAQAAEVQLQQSGPELVKPGTSVRISCKTSGYTFTEYTIHWVKQSHGKSLEWIGNINPNNGGTTYNQKFEDKATLTVDKSSSTAYMELRSLTSEDSAVYYCAAGWNFDYWGQGTTVTVSSGGGGSGGGGSGGGGSDIVMTQSHKFMSTSVGDRVSIICKASQDVGTAVDWYQQKPGQSPKLLIYWASTRHTGVPDRFTGSGSGTDFTLTITNVQSEDLADYFCQQYNSYPLTFGAGTMLDLKRAAARSDPASGAGSGSGSAKNESAASSTGKTPAAEETVTTILGMLASPYHYLIIIVVLVIILAVVVVGFSCRKKFISYLKGICSGGGGGPERVHRVLFRRRSCPSRVPGAEDNARNETLSNRYLQPTQVSEQEIQGQELAELTGVTVELPEEPQRLLEQAEAEGCQRRRLLVPVNDADSADISTLLDASATLEEGHAKETIQDQLVGSEKLFYEEDEAGSATSCLSHG

SEQ ID NO: 144 - protein, 425 aa, artificial sequence
  Polypeptide encoded by pCLS27486 with PSMA - iCD33
MALPVTALLLPLALLLHAARPGSGSGAQAAEVQLQQSGPELVKPGTSVRISCKTSGYTFTEYTIHWVKQSHGKSLEWIGNINPNNGGTTYNQKFEDKATLTVDKSSSTAYMELRSLTSEDSAVYYCAAGWNFDYWGQGTTVTVSSGGGGSGGGGSGGGGSDIVMTQSHKFMSTSVGDRVSIICKASQDVGTAVDWYQQKPGQSPKLLIYWASTRHTGVPDRFTGSGSGTDFTLTITNVQSEDLADYFCQQYNSYPLTFGAGTMLDLKRAAARSDPASGAGSGSGSALNVTYVPQNPTTGIFPGDGSGKQETRAGVVHGAIGGAGVTALLALCLCLIFFIVKTHRRKAARTAVGRNDTHPTTGSASPKHQKKSKLHGPTETSSCSGAAPTVEMDEELHYASLNFHGMNPSKDTSTEYSEVRTQSHG

SEQ ID NO: 145 - protein, 386 aa, artificial sequence
  Polypeptide encoded by pCLS27487 with PSMA - iFCG2B
MALPVTALLLPLALLLHAARPGSGSGAQAAEVQLQQSGPELVKPGTSVRISCKTSGYTFTEYTIHWVKQSHGKSLEWIGNINPNNGGTTYNQKFEDKATLTVDKSSSTAYMELRSLTSEDSAVYYCAAGWNFDYWGQGTTVTVSSGGGGSGGGGSGGGGSDIVMTQSHKFMSTSVGDRVSIICKASQDVGTAVDWYQQKPGQSPKLLIYWASTRHTGVPDRFTGSGSGTDFTLTITNVQSEDLADYFCQQYNSYPLTFGAGTMLDLKRAAARSDPASGAGSGSGSAVQAPSSSPMGIIVAVVTGIAVAAIVAAVVALIYCRKKRISALPGYPECREMGETLPEKPANPTNPDEADKVGAENTITYSLLMHPDALEEPDDQNRISHG

SEQ ID NO: 146 - protein, 427 aa, artificial sequence
  Polypeptide encoded by pCLS27488 with PSMA - iFCRL1
MALPVTALLLPLALLLHAARPGSGSGAQAAEVQLQQSGPELVKPGTSVRISCKTSGYTFTEYTIHWVKQSHGKSLEWIGNINPNNGGTTYNQKFEDKATLTVDKSSSTAYMELRSLTSEDSAVYYCAAGWNFDYWGQGTTVTVSSGGGGSGGGGSGGGGSDIVMTQSHKFMSTSVGDRVSIICKASQDVGTAVDWYQQKPGQSPKLLIYWASTRHTGVPDRFTGSGSGTDFTLTITNVQSEDLADYFCQQYNSYPLTFGAGTMLDLKRAAARSDPASGAGSGSGSALNFTVPTGARSNHLTSGVIEGLLSTLGPATVALLFCYGLKRKIGRRSARDPLRSLPSPLPQEFTYLNSPTPGQLQPIYENVNVVSGDEVYSLAYYNQPEQESVAAETLGTHMEDKVSLDIYSRLRKANITDVDYEDAMSHG

SEQ ID NO: 147 - protein, 410 aa, artificial sequence
  Polypeptide encoded by pCLS27489 with PSMA - iFCRL2
MALPVTALLLPLALLLHAARPGSGSGAQAAEVQLQQSGPELVKPGTSVRISCKTSGYTFTEYTIHWVKQSHGKSLEWIGNINPNNGGTTYNQKFEDKATLTVDKSSSTAYMELRSLTSEDSAVYYCAAGWNFDYWGQGTTVTVSSGGGGSGGGGSGGGGSDIVMTQSHKFMSTSVGDRVSIICKASQDVGTAVDWYQQKPGQSPKLLIYWASTRHTGVPDRFTGSGSGTDFTLTITNVQSEDLADYFCQQYNSYPLTFGAGTMLDLKRAAARSDPASGAGSGSGSAGPDGYRRDLMTAGVLWGLFGVLGFTGVALLLYALFHKISGESSATNEPRGASRPNPQEFTYSSPTPDMEELQPVYVNVGSVDVDVVYSQVWSMQQPESSANIRTLLENKDSQVIYSSVKKSSHG

SEQ ID NO: 148 - protein, 460 aa, artificial sequence
  Polypeptide encoded by pCLS27490 with PSMA - iFCRL3
MALPVTALLLPLALLLHAARPGSGSGAQAAEVQLQQSGPELVKPGTSVRISCKTSGYTFTEYTIHWVKQSHGKSLEWIGNINPNNGGTTYNQKFEDKATLTVDKSSSTAYMELRSLTSEDSAVYYCAAGWNFDYWGQGTTVTVSSGGGGSGGGGSGGGGSDIVMTQSHKFMSTSVGDRVSIICKASQDVGTAVDWYQQKPGQSPKLLIYWASTRHTGVPDRFTGSGSGTDFTLTITNVQSEDLADYFCQQYNSYPLTFGAGTMLDLKRAAARSDPASGAGSGSGSAGTSRNRTGLTAAGITGLVLSILVLAAAAALLHYARARRKPGGLSATGTSSHSPSECQEPSSSRPSRIDPQEPTHSKPLAPMELEPMYSNANPGDSNPIYSQIWSIQHTKENSANCPMMHQEHEELTVLYSELKKTHPDDSAGEASSRGRAHEEDDEENYENVPRVLLASDHSHG

SEQ ID NO: 149 - protein, 430 aa, artificial sequence
  Polypeptide encoded by pCLS27491 with PSMA - iFCRL4
MALPVTALLLPLALLLHAARPGSGSGAQAAEVQLQQSGPELVKPGTSVRISCKTSGYTFTEYTIHWVKQSHGKSLEWIGNINPNNGGTTYNQKFEDKATLTVDKSSSTAYMELRSLTSEDSAVYYCAAGWNFDYWGQGTTVTVSSGGGGSGGGGSGGGGSDIVMTQSHKFMSTSVGDRVSIICKASQDVGTAVDWYQQKPGQSPKLLIYWASTRHTGVPDRFTGSGSGTDFTLTITNVQSEDLADYFCQQYNSYPLTFGAGTMLDLKRAAARSDPASGAGSGSGSAVTVRETPGNRDGLVAAGATGGLLSALLLAVALLFHCWRRRKSGVGFLGDETRLPPAPGPGESSHSICPAQVELQSLYVDVHPKKGDLVYSEIQTTQLGEEEEANTSRTLLEDKDVSVVYSEVKTQHPDNSAGKISSKDEESSHG

SEQ ID NO: 150 - protein, 432 aa, artificial sequence
  Polypeptide encoded by pCLS27492 with PSMA - iFCRL5
MALPVTALLLPLALLLHAARPGSGSGAQAAEVQLQQSGPELVKPGTSVRISCKTSGYTFTEYTIHWVKQSHGKSLEWIGNINPNNGGTTYNQKFEDKATLTVDKSSSTAYMELRSLTSEDSAVYYCAAGWNFDYWGQGTTVTVSSGGGGSGGGGSGGGGSDIVMTQSHKFMSTSVGDRVSIICKASQDVGTAVDWYQQKPGQSPKLLIYWASTRHTGVPDRFTGSGSGTDFTLTITNVQSEDLADYFCQQYNSYPLTFGAGTMLDLKRAAARSDPASGAGSGSGSALYITGLTANRSGPFATGVAGGLLSIAGLAAGALLLYCWLSRKAGRKPASDPARSPPDSDSQEPTYHNVPAWEELQPVYTNANPRGENVVYSEVRIIQEKKKHAVASDPRHLRNKGSPIIYSEVKVASTPVSGSLFLASSAPHRSHG

SEQ ID NO: 151 - protein, 468 aa, artificial sequence
  Polypeptide encoded by pCLS27493 with PSMA - iLIRB2
MALPVTALLLPLALLLHAARPGSGSGAQAAEVQLQQSGPELVKPGTSVRISCKTSGYTFTEYTIHWVKQSHGKSLEWIGNINPNNGGTTYNQKFEDKATLTVDKSSSTAYMELRSLTSEDSAVYYCAAGWNFDYWGQGTTVTVSSGGGGSGGGGSGGGGSDIVMTQSHKFMSTSVGDRVSIICKASQDVGTAVDWYQQKPGQSPKLLIYWASTRHTGVPDRFTGSGSGTDFTLTITNVQSEDLADYFCQQYNSYPLTFGAGTMLDLKRAAARSDPASGAGSGSGSAGPSMGSSPPPTGPISTPAGPEDQPLTPTGSDPQSGLGRHLGVVIGILVAVVLLLLLLLLLFLILRHRRQGKHWTSTQRKADFQHPAGAVGPEPTDRGLQWRSSPAADAQEENLYAAVKDTQPEDGVEMDTRAAASEAPQDVTYAQLHSLTLRRKATEPPPSQEREPPAEPSIYATLAIHSHG

SEQ ID NO: 152 - protein, 501 aa, artificial sequence
  Polypeptide encoded by pCLS27494 with PSMA - iLIRB3
MALPVTALLLPLALLLHAARPGSGSGAQAAEVQLQQSGPELVKPGTSVRISCKTSGYTFTEYTIHWVKQSHGKSLEWIGNINPNNGGTTYNQKFEDKATLTVDKSSSTAYMELRSLTSEDSAVYYCAAGWNFDYWGQGTTVTVSSGGGGSGGGGSGGGGSDIVMTQSHKFMSTSVGDRVSIICKASQDVGTAVDWYQQKPGQSPKLLIYWASTRHTGVPDRFTGSGSGTDFTLTITNVQSEDLADYFCQQYNSYPLTFGAGTMLDLKRAAARSDPASGAGSGSGSAGHSGGSSLPPTGPPSTPGLGRYLEVLIGVSVAFVLLLFLLLFLLLRRQRHSKHRTSDQRKTDFQRPAGAAETEPKDRGLLRRSSPAADVQEENLYAAVKDTQSEDRVELDSQSPHDEDPQAVTYAPVKHSSPRREMASPPSSLSGEFLDTKDRQVEEDRQMDTEAAASEASQDVTYAQLHSLTLRRKATEPPPSQEGEPPAEPSIYATLAIHSHG

SEQ ID NO: 153 - protein, 519 aa, artificial sequence
  Polypeptide encoded by pCLS27495 with PSMA - iLIRB4
MALPVTALLLPLALLLHAARPGSGSGAQAAEVQLQQSGPELVKPGTSVRISCKTSGYTFTEYTIHWVKQSHGKSLEWIGNINPNNGGTTYNQKFEDKATLTVDKSSSTAYMELRSLTSEDSAVYYCAAGWNFDYWGQGTTVTVSSGGGGSGGGGSGGGGSDIVMTQSHKFMSTSVGDRVSIICKASQDVGTAVDWYQQKPGQSPKLLIYWASTRHTGVPDRFTGSGSGTDFTLTITNVQSEDLADYFCQQYNSYPLTFGAGTMLDLKRAAARSDPASGAGSGSGSAGSLEGPRPSPTRSVSTAAGPEDQPLMPTGSVPHSGLRRHWEVLIGVLVVSILLLSLLLFLLLQHWRQGKHRTLAQRQADFQRPPGAAEPEPKDGGLQRRSSPAADVQGENFCAAVKNTQPEDGVEMDTRQSPHDEDPQAVTYAKVKHSRPRREMASPPSPLSGEFLDTKDRQAEEDRQMDTEAAASEAPQDVTYAQLHSFTLRQKATEPPPSQEGASPAEPSVYATLAIHSHG

SEQ ID NO: 154 - protein, 461 aa, artificial sequence
  Polypeptide encoded by pCLS27496 with PSMA - iLIRB5
MALPVTALLLPLALLLHAARPGSGSGAQAAEVQLQQSGPELVKPGTSVRISCKTSGYTFTEYTIHWVKQSHGKSLEWIGNINPNNGGTTYNQKFEDKATLTVDKSSSTAYMELRSLTSEDSAVYYCAAGWNFDYWGQGTTVTVSSGGGGSGGGGSGGGGSDIVMTQSHKFMSTSVGDRVSIICKASQDVGTAVDWYQQKPGQSPKLLIYWASTRHTGVPDRFTGSGSGTDFTLTITNVQSEDLADYFCQQYNSYPLTFGAGTMLDLKRAAARSDPASGAGSGSGSAGPSGDPSLSPTGSTPTPGPEDQPLTPTGLDPQSGLGRHLGVVTGVSVAFVLLLFLLLFLLLRHRHQSKHRTSAHFYRPAGAAGPEPKDQGLQKRASPVADIQEEILNAAVKDTQPKDGVEMDARAAASEAPQDVTYAQLHSLTLRREATEPPPSQEREPPAEPSIYAPLAIHSHG

SEQ ID NO: 155 - protein, 419 aa, artificial sequence
  Polypeptide encoded by pCLS27497 with PSMA - iMILR1
MALPVTALLLPLALLLHAARPGSGSGAQAAEVQLQQSGPELVKPGTSVRISCKTSGYTFTEYTIHWVKQSHGKSLEWIGNINPNNGGTTYNQKFEDKATLTVDKSSSTAYMELRSLTSEDSAVYYCAAGWNFDYWGQGTTVTVSSGGGGSGGGGSGGGGSDIVMTQSHKFMSTSVGDRVSIICKASQDVGTAVDWYQQKPGQSPKLLIYWASTRHTGVPDRFTGSGSGTDFTLTITNVQSEDLADYFCQQYNSYPLTFGAGTMLDLKRAAARSDPASGAGSGSGSAMPSTGGDSCPFCLKLLLPGLLLLLVVIILILAFWVLPKYKTRKAMRNNVPRDRGDTAMEVGIYANILEKQAKEESVPEVGSRPCVSTAQDEAKHSQELQYATPVFQEVAPREQEACDSYKSGYVYSELNFSHG

SEQ ID NO: 156 - protein, 412 aa, artificial sequence
  Polypeptide encoded by pCLS27498 with PSMA - iMPZL1
MALPVTALLLPLALLLHAARPGSGSGAQAAEVQLQQSGPELVKPGTSVRISCKTSGYTFTEYTIHWVKQSHGKSLEWIGNINPNNGGTTYNQKFEDKATLTVDKSSSTAYMELRSLTSEDSAVYYCAAGWNFDYWGQGTTVTVSSGGGGSGGGGSGGGGSDIVMTQSHKFMSTSVGDRVSIICKASQDVGTAVDWYQQKPGQSPKLLIYWASTRHTGVPDRFTGSGSGTDFTLTITNVQSEDLADYFCQQYNSYPLTFGAGTMLDLKRAAARSDPASGAGSGSGSAPGHIRLYVVEKENLPVFPVWVVVGIVTAVVLGLTLLISMILAVLYRRKNSKRDYTGCSTSESLSPVKQAPRKSPSDTEGLVKSLPSGSHQGPVIYAQLDHSGGHHSDKINKSESVVYADIRKNSHG

SEQ ID NO: 157 - protein, 442 aa, artificial sequence
  Polypeptide encoded by pCLS27499 with PSMA - iPILRA
MALPVTALLLPLALLLHAARPGSGSGAQAAEVQLQQSGPELVKPGTSVRISCKTSGYTFTEYTIHWVKQSHGKSLEWIGNINPNNGGTTYNQKFEDKATLTVDKSSSTAYMELRSLTSEDSAVYYCAAGWNFDYWGQGTTVTVSSGGGGSGGGGSGGGGSDIVMTQSHKFMSTSVGDRVSIICKASQDVGTAVDWYQQKPGQSPKLLIYWASTRHTGVPDRFTGSGSGTDFTLTITNVQSEDLADYFCQQYNSYPLTFGAGTMLDLKRAAARSDPASGAGSGSGSAQAVTTTTQRPSSMTTTWRLSSTTTTTGLRVTQGKRRSDSWHISLETAVGVAVAVTVLGIMILGLICLLRWRRRKGQQRTKATTPAREPFQNTEEPYENIRNEGQNTDPKLNPKDDGIVYASLALSSSTSPKAPPSHRPLKSPQNETLYSVLKASHG

SEQ ID NO: 158 - protein, 378 aa, artificial sequence
  Polypeptide encoded by pCLS27501 with PSMA - iPVR
MALPVTALLLPLALLLHAARPGSGSGAQAAEVQLQQSGPELVKPGTSVRISCKTSGYTFTEYTIHWVKQSHGKSLEWIGNINPNNGGTTYNQKFEDKATLTVDKSSSTAYMELRSLTSEDSAVYYCAAGWNFDYWGQGTTVTVSSGGGGSGGGGSGGGGSDIVMTQSHKFMSTSVGDRVSIICKASQDVGTAVDWYQQKPGQSPKLLIYWASTRHTGVPDRFTGSGSGTDFTLTITNVQSEDLADYFCQQYNSYPLTFGAGTMLDLKRAAARSDPASGAGSGSGSAVKEGPPSEHSGISRNAIIFLVLGILVFLILLGIGIYFYWSKCSREVLWHCHLCPSSTEHASASANGHVSYSAVSRENSSSQDPQTEGTRSHG

SEQ ID NO: 159 - protein, 545 aa, artificial sequence
  Polypeptide encoded by pCLS27502 with PSMA - iSIG10
MALPVTALLLPLALLLHAARPGSGSGAQAAEVQLQQSGPELVKPGTSVRISCKTSGYTFTEYTIHWVKQSHGKSLEWIGNINPNNGGTTYNQKFEDKATLTVDKSSSTAYMELRSLTSEDSAVYYCAAGWNFDYWGQGTTVTVSSGGGGSGGGGSGGGGSDIVMTQSHKFMSTSVGDRVSIICKASQDVGTAVDWYQQKPGQSPKLLIYWASTRHTGVPDRFTGSGSGTDFTLTITNVQSEDLADYFCQQYNSYPLTFGAGTMLDLKRAAARSDPASGAGSGSGSAVHYSPKLLGPSCSWEAEGLHCSCSSQASPAPSLRWWLGEELLEGNSSQDSFEVTPSSAGPWANSSLSLHGGLSSGLRLRCEAWNVHGAQSGSILQLPDKKGLISTAFSNGAFLGIGITALLFLCLALIIMKILPKRRTQTETPRPRFSRHSTILDYINVVPTAGPLAQKRNQKATPNSPRTPLPPGAPSPESKKNQKKQYQLPSFPEPKSSTQAPESQESQEELHYATLNFPGVRPRPEARMPKGTQADYAEVKFQSHG

SEQ ID NO: 160 - protein, 535 aa, artificial sequence
  Polypeptide encoded by pCLS27503 with PSMA - iSIG11
MALPVTALLLPLALLLHAARPGSGSGAQAAEVQLQQSGPELVKPGTSVRISCKTSGYTFTEYTIHWVKQSHGKSLEWIGNINPNNGGTTYNQKFEDKATLTVDKSSSTAYMELRSLTSEDSAVYYCAAGWNFDYWGQGTTVTVSSGGGGSGGGGSGGGGSDIVMTQSHKFMSTSVGDRVSIICKASQDVGTAVDWYQQKPGQSPKLLIYWASTRHTGVPDRFTGSGSGTDFTLTITNVQSEDLADYFCQQYNSYPLTFGAGTMLDLKRAAARSDPASGAGSGSGSAVHYPPQLLGPSCSWEAEGLHCSCSSQASPAPSLRWWLGEELLEGNSSQGSFEVTPSSAGPWANSSLSLHGGLSSGLRLRCKAWNVHGAQSGSVFQLLPGKLEHGGGLGLGAALGAGVAALLAFCSCLVVFRVKICRKEARKRAAAEQDVPSTLGPISQGHQHECSAGSSQDHPPPGAATYTPGKGEEQELHYASLSFQGLRLWEPADQEAPSTTEYSEIKIHTGQPLRGPGFGLQLEREMSGMVPKSHG

SEQ ID NO: 161 - protein, 422 aa, artificial sequence
  Polypeptide encoded by pCLS27504 with PSMA - iSIG12
MALPVTALLLPLALLLHAARPGSGSGAQAAEVQLQQSGPELVKPGTSVRISCKTSGYTFTEYTIHWVKQSHGKSLEWIGNINPNNGGTTYNQKFEDKATLTVDKSSSTAYMELRSLTSEDSAVYYCAAGWNFDYWGQGTTVTVSSGGGGSGGGGSGGGGSDIVMTQSHKFMSTSVGDRVSIICKASQDVGTAVDWYQQKPGQSPKLLIYWASTRHTGVPDRFTGSGSGTDFTLTITNVQSEDLADYFCQQYNSYPLTFGAGTMLDLKRAAARSDPASGAGSGSGSALQNEYTGKMRPISGVTLGAFGGAGATALVFLYFCIIFVVVRSCRKKSARPAVGVGDTGMEDANAVRGSASQGPLIESPADDSPPHHAPPALATPSPEEGEIQYASLSFHKARPQYPQEQEAIGYEYSEINIPKSHG

SEQ ID NO: 162 - protein, 510 aa, artificial sequence
  Polypeptide encoded by pCLS27505 with PSMA - iSIGL5
MALPVTALLLPLALLLHAARPGSGSGAQAAEVQLQQSGPELVKPGTSVRISCKTSGYTFTEYTIHWVKQSHGKSLEWIGNINPNNGGTTYNQKFEDKATLTVDKSSSTAYMELRSLTSEDSAVYYCAAGWNFDYWGQGTTVTVSSGGGGSGGGGSGGGGSDIVMTQSHKFMSTSVGDRVSIICKASQDVGTAVDWYQQKPGQSPKLLIYWASTRHTGVPDRFTGSGSGTDFTLTITNVQSEDLADYFCQQYNSYPLTFGAGTMLDLKRAAARSDPASGAGSGSGSAVYSLPQLLGPSCSWEAEGLHCRCSFRAWPAPSLCWRLEEKPLEGNSSQGSFKVNSSSPGPWANSSLILHGGLNSDLKVSCKAWNIYGSQSGSVLLLQGRSNLGTGVVPAALGGAGVMALLCICLCLIFFLIVKARRKQAAGRPEKMDDEDPIMGTITSGSRKKPWPDSPGDQASPPGDAPPLEEQKELHYASLSFSEMKSREPKDQEAPSTTEYSEIKTSKSHG

SEQ ID NO: 163 - protein, 409 aa, artificial sequence
  Polypeptide encoded by pCLS27506 with PSMA - iSIGL6
MALPVTALLLPLALLLHAARPGSGSGAQAAEVQLQQSGPELVKPGTSVRISCKTSGYTFTEYTIHWVKQSHGKSLEWIGNINPNNGGTTYNQKFEDKATLTVDKSSSTAYMELRSLTSEDSAVYYCAAGWNFDYWGQGTTVTVSSGGGGSGGGGSGGGGSDIVMTQSHKFMSTSVGDRVSIICKASQDVGTAVDWYQQKPGQSPKLLIYWASTRHTGVPDRFTGSGSGTDFTLTITNVQSEDLADYFCQQYNSYPLTFGAGTMLDLKRAAARSDPASGAGSGSGSALFVHWKPEGRAGGVLGAVWGASITTLVFLCVCFIFRVKTRRKKAAQPVQNTDDVNPVMVSGSRGHQHQFQTGIVSDHPAEAGPISEDEQELHYAVLHFHKVQPQEPKVTDTEYSEIKIHKSHG

SEQ ID NO: 164 - protein, 420 aa, artificial sequence
  Polypeptide encoded by pCLS27507 with PSMA - iSIGL7
MALPVTALLLPLALLLHAARPGSGSGAQAAEVQLQQSGPELVKPGTSVRISCKTSGYTFTEYTIHWVKQSHGKSLEWIGNINPNNGGTTYNQKFEDKATLTVDKSSSTAYMELRSLTSEDSAVYYCAAGWNFDYWGQGTTVTVSSGGGGSGGGGSGGGGSDIVMTQSHKFMSTSVGDRVSIICKASQDVGTAVDWYQQKPGQSPKLLIYWASTRHTGVPDRFTGSGSGTDFTLTITNVQSEDLADYFCQQYNSYPLTFGAGTMLDLKRAAARSDPASGAGSGSGSALQQEYTGKMRPVSGVLLGAVGGAGATALVFLSFCVIFIVVRSCRKKSARPAADVGDIGMKDANTIRGSASQGNLTESWADDNPRHHGLAAHSSGEEREIQYAPLSFHKGEPQDLSGQEATNNEYSEIKIPKSHG

SEQ ID NO: 165 - protein, 444 aa, artificial sequence
  Polypeptide encoded by pCLS27508 with PSMA - iSIGL8
MALPVTALLLPLALLLHAARPGSGSGAQAAEVQLQQSGPELVKPGTSVRISCKTSGYTFTEYTIHWVKQSHGKSLEWIGNINPNNGGTTYNQKFEDKATLTVDKSSSTAYMELRSLTSEDSAVYYCAAGWNFDYWGQGTTVTVSSGGGGSGGGGSGGGGSDIVMTQSHKFMSTSVGDRVSIICKASQDVGTAVDWYQQKPGQSPKLLIYWASTRHTGVPDRFTGSGSGTDFTLTITNVQSEDLADYFCQQYNSYPLTFGAGTMLDLKRAAARSDPASGAGSGSGSALQNEGTGTSRPVSQVTLAAVGGAGATALAFLSFCIIFIIVRSCRKKSARPAAGVGDTGMEDAKAIRGSASQGPLTESWKDGNPLKKPPPAVAPSSGEEGELHYATLSFHKVKPQDPQGQEATDSEYSEIKIHKRETAETQACLRNHNPSSKEVRGSHG

SEQ ID NO: 166 - protein, 416 aa, artificial sequence
  Polypeptide encoded by pCLS27509 with PSMA - iSIGL9
MALPVTALLLPLALLLHAARPGSGSGAQAAEVQLQQSGPELVKPGTSVRISCKTSGYTFTEYTIHWVKQSHGKSLEWIGNINPNNGGTTYNQKFEDKATLTVDKSSSTAYMELRSLTSEDSAVYYCAAGWNFDYWGQGTTVTVSSGGGGSGGGGSGGGGSDIVMTQSHKFMSTSVGDRVSIICKASQDVGTAVDWYQQKPGQSPKLLIYWASTRHTGVPDRFTGSGSGTDFTLTITNVQSEDLADYFCQQYNSYPLTFGAGTMLDLKRAAARSDPASGAGSGSGSALQSKATSGVTQGVVGGAGATALVFLSFCVIFVVVRSCRKKSARPAAGVGDTGIEDANAVRGSASQGPLTEPWAEDSPPDQPPPASARSSVGEGELQYASLSFQMVKPWDSRGQEATDTEYSEIKIHRSHG

SEQ ID NO: 167 - protein, 432 aa, artificial sequence
  Polypeptide encoded by pCLS27510 with PSMA - iKI2L1
MALPVTALLLPLALLLHAARPGSGSGAQAAEVQLQQSGPELVKPGTSVRISCKTSGYTFTEYTIHWVKQSHGKSLEWIGNINPNNGGTTYNQKFEDKATLTVDKSSSTAYMELRSLTSEDSAVYYCAAGWNFDYWGQGTTVTVSSGGGGSGGGGSGGGGSDIVMTQSHKFMSTSVGDRVSIICKASQDVGTAVDWYQQKPGQSPKLLIYWASTRHTGVPDRFTGSGSGTDFTLTITNVQSEDLADYFCQQYNSYPLTFGAGTMLDLKRAAARSDPASGAGSGSGSAPYEWSKSSDPLLVSVTGNPSNSWPSPTEPSSKTGNPRHLHILIGTSVVIILFILLFFLLHRWCSNKKNAAVMDQESAGNRTANSEDSDEQDPQEVTYTQLNHCVFTQRKITRPSQRPKTPPTDIIVYTELPNAESRSKVVSCPSHG

SEQ ID NO: 168 - protein, 432 aa, artificial sequence
  Polypeptide encoded by pCLS27511 with PSMA - iKI2L2
MALPVTALLLPLALLLHAARPGSGSGAQAAEVQLQQSGPELVKPGTSVRISCKTSGYTFTEYTIHWVKQSHGKSLEWIGNINPNNGGTTYNQKFEDKATLTVDKSSSTAYMELRSLTSEDSAVYYCAAGWNFDYWGQGTTVTVSSGGGGSGGGGSGGGGSDIVMTQSHKFMSTSVGDRVSIICKASQDVGTAVDWYQQKPGQSPKLLIYWASTRHTGVPDRFTGSGSGTDFTLTITNVQSEDLADYFCQQYNSYPLTFGAGTMLDLKRAAARSDPASGAGSGSGSAPYEWSNSSDPLLVSVIGNPSNSWPSPTEPSSKTGNPRHLHILIGTSVVIILFILLFFLLHRWCSNKKNAAVMDQESAGNRTANSEDSDEQDPQEVTYTQLNHCVFTQRKITRPSQRPKTPPTDIIVYAELPNAESRSKVVSCPSHG

SEQ ID NO: 169 - protein, 425 aa, artificial sequence
  Polypeptide encoded by pCLS27512 with PSMA - iKI2L3
MALPVTALLLPLALLLHAARPGSGSGAQAAEVQLQQSGPELVKPGTSVRISCKTSGYTFTEYTIHWVKQSHGKSLEWIGNINPNNGGTTYNQKFEDKATLTVDKSSSTAYMELRSLTSEDSAVYYCAAGWNFDYWGQGTTVTVSSGGGGSGGGGSGGGGSDIVMTQSHKFMSTSVGDRVSIICKASQDVGTAVDWYQQKPGQSPKLLIYWASTRHTGVPDRFTGSGSGTDFTLTITNVQSEDLADYFCQQYNSYPLTFGAGTMLDLKRAAARSDPASGAGSGSGSAPYEWSNSSDPLLVSVTGNPSNSWPSPTEPSSETGNPRHLHVLIGTSVVIILFILLLFFLLHRWCCNKKNAVVMDQEPAGNRTVNREDSDEQDPQEVTYAQLNHCVFTQRKITRPSQRPKTPPTDIIVYTELPNAEPSHG

SEQ ID NO: 170 - protein, 464 aa, artificial sequence
  Polypeptide encoded by pCLS27513 with PSMA - iKI2L4
MALPVTALLLPLALLLHAARPGSGSGAQAAEVQLQQSGPELVKPGTSVRISCKTSGYTFTEYTIHWVKQSHGKSLEWIGNINPNNGGTTYNQKFEDKATLTVDKSSSTAYMELRSLTSEDSAVYYCAAGWNFDYWGQGTTVTVSSGGGGSGGGGSGGGGSDIVMTQSHKFMSTSVGDRVSIICKASQDVGTAVDWYQQKPGQSPKLLIYWASTRHTGVPDRFTGSGSGTDFTLTITNVQSEDLADYFCQQYNSYPLTFGAGTMLDLKRAAARSDPASGAGSGSGSAPYEWSDASDPLPVSVTGNPSSSWPSPTEPSFKTGIARHLHAVIRYSVAIILFTILPFFLLHRWCSKKKDAAVMNQEPAGHRTVNREDSDEQDPQEVTYAQLDHCIFTQRKITGPSQRSKRPSTDTSVCIELPNAEPRALSPAHEHHSQALMGSSRETTALSQTQLASSHVPAAGISHG

SEQ ID NO: 171 - protein, 464 aa, artificial sequence
  Polypeptide encoded by pCLS27514 with PSMA - iKI2LA
MALPVTALLLPLALLLHAARPGSGSGAQAAEVQLQQSGPELVKPGTSVRISCKTSGYTFTEYTIHWVKQSHGKSLEWIGNINPNNGGTTYNQKFEDKATLTVDKSSSTAYMELRSLTSEDSAVYYCAAGWNFDYWGQGTTVTVSSGGGGSGGGGSGGGGSDIVMTQSHKFMSTSVGDRVSIICKASQDVGTAVDWYQQKPGQSPKLLIYWASTRHTGVPDRFTGSGSGTDFTLTITNVQSEDLADYFCQQYNSYPLTFGAGTMLDLKRAAARSDPASGAGSGSGSAPYEWSDPSDPLLVSVTGNSSSSSSSPTEPSSKTGIRRHLHILIGTSVAIILFIILFFFLLHCCCSNKKNAAVMDQEPAGDRTVNREDSDDQDPQEVTYAQLDHCVFTQTKITSPSQRPKTPPTDTTMYMELPNAKPRSLSPAHKHHSQALRGSSRETTALSQNRVASSHVPAAGISHG

SEQ ID NO: 172 - protein, 433 aa, artificial sequence
  Polypeptide encoded by pCLS27515 with PSMA - iKI3L1
MALPVTALLLPLALLLHAARPGSGSGAQAAEVQLQQSGPELVKPGTSVRISCKTSGYTFTEYTIHWVKQSHGKSLEWIGNINPNNGGTTYNQKFEDKATLTVDKSSSTAYMELRSLTSEDSAVYYCAAGWNFDYWGQGTTVTVSSGGGGSGGGGSGGGGSDIVMTQSHKFMSTSVGDRVSIICKASQDVGTAVDWYQQKPGQSPKLLIYWASTRHTGVPDRFTGSGSGTDFTLTITNVQSEDLADYFCQQYNSYPLTFGAGTMLDLKRAAARSDPASGAGSGSGSAPYEWSDPSDPLLVSVTGNPSSSWPSPTEPSSKSGNPRHLHILIGTSVVIILFILLLFFLLHLWCSNKKNAAVMDQEPAGNRTANSEDSDEQDPEEVTYAQLDHCVFTQRKITRPSQRPKTPPTDTILYTELPNAKPRSKVVSCPSHG

SEQ ID NO: 173 - protein, 444 aa, artificial sequence
  Polypeptide encoded by pCLS27516 with PSMA - iKI3L2
MALPVTALLLPLALLLHAARPGSGSGAQAAEVQLQQSGPELVKPGTSVRISCKTSGYTFTEYTIHWVKQSHGKSLEWIGNINPNNGGTTYNQKFEDKATLTVDKSSSTAYMELRSLTSEDSAVYYCAAGWNFDYWGQGTTVTVSSGGGGSGGGGSGGGGSDIVMTQSHKFMSTSVGDRVSIICKASQDVGTAVDWYQQKPGQSPKLLIYWASTRHTGVPDRFTGSGSGTDFTLTITNVQSEDLADYFCQQYNSYPLTFGAGTMLDLKRAAARSDPASGAGSGSGSAPCVWSNSSDPLLVSVTGNPSSSWPSPTEPSSKSGICRHLHVLIGTSVVIFLFILLLFFLLYRWCSNKKNAAVMDQEPAGDRTVNRQDSDEQDPQEVTYAQLDHCVFIQRKISRPSQRPKTPLTDTSVYTELPNAEPRSKVVSCPRAPQSGLEGVFSHG

SEQ ID NO: 174 - protein, 404 aa, artificial sequence
  Polypeptide encoded by pCLS27517 with PSMA - iKI3L3
MALPVTALLLPLALLLHAARPGSGSGAQAAEVQLQQSGPELVKPGTSVRISCKTSGYTFTEYTIHWVKQSHGKSLEWIGNINPNNGGTTYNQKFEDKATLTVDKSSSTAYMELRSLTSEDSAVYYCAAGWNFDYWGQGTTVTVSSGGGGSGGGGSGGGGSDIVMTQSHKFMSTSVGDRVSIICKASQDVGTAVDWYQQKPGQSPKLLIYWASTRHTGVPDRFTGSGSGTDFTLTITNVQSEDLADYFCQQYNSYPLTFGAGTMLDLKRAAARSDPASGAGSGSGSASFRALPHAWSDPSDPLPVSVTGNSRYLHALIGTSVVIIPFAILLFFLLHRWCANKKNAVVMDQEPAGNRTVNREDSDEQDPQEVTYAQLNHCVFTQRKITRPSQRPKTPPTDTSVSHG

SEQ ID NO: 175 - protein, 436 aa, artificial sequence
  Polypeptide encoded by pCLS27518 with PSMA - iPECA1
MALPVTALLLPLALLLHAARPGSGSGAQAAEVQLQQSGPELVKPGTSVRISCKTSGYTFTEYTIHWVKQSHGKSLEWIGNINPNNGGTTYNQKFEDKATLTVDKSSSTAYMELRSLTSEDSAVYYCAAGWNFDYWGQGTTVTVSSGGGGSGGGGSGGGGSDIVMTQSHKFMSTSVGDRVSIICKASQDVGTAVDWYQQKPGQSPKLLIYWASTRHTGVPDRFTGSGSGTDFTLTITNVQSEDLADYFCQQYNSYPLTFGAGTMLDLKRAAARSDPASGAGSGSGSAVRVILAPWKKGLIAVVIIGVIIALLIIAAKCYFLRKAKAKQMPVEMSRPAVPLLNSNNEKMSDPNMEANSHYGHNDDVGNHAMKPINDNKEPLNSDVQYTEVQVSSAESHKDLGKKDTETVYSEVRKAVPDAVESRYSRTEGSLDGTSHG

SEQ ID NO: 176 - protein, 434 aa, artificial sequence
  Polypeptide encoded by pCLS27574 with CD20 - iPD1 -v2
MALPVTALLLPLALLLHAARPGSGSGAQAAEVQLVESGGGLVQPGRSLRLSCAASGFTFNDYAMHWVRQAPGKGLEWVSTISWNSGSIGYADSVKGRFTISRDNAKKSLYLQMNSLRAEDTALYYCAKDIQYGNYYYGMDVWGQGTTVTVSSGGGGSGGGGSGGGGSEIVLTQSPATLSLSPGERATLSCRASQSVSSYLAWYQQKPGQAPRLLIYDASNRATGIPARFSGSGSGTDFTLTISSLEPEDFAVYYCQQRSNWPITFGQGTRLEIKRSDPASGAGSGSGSAERRAEVPTAHPSPSPRPAGQFQTLVVGVVGGLLGSLVLLVWVLAVICSRAARGTIGARRTGQPLKEDPSAVPVFSVDYGELDFQWREKTPEPPVPCVPEQTEYATIVFPSGMGTSSPARRGSADGPRSAQPLRPEDGHCSWPLSH

SEQ ID NO: 177 - protein, 389 aa, artificial sequence
  Polypeptide encoded by pCLS27698 with CD20 - iCD200R
MALPVTALLLPLALLLHAARPGSGSGAQAAEVQLVESGGGLVQPGRSLRLSCAASGFTFNDYAMHWVRQAPGKGLEWVSTISWNSGSIGYADSVKGRFTISRDNAKKSLYLQMNSLRAEDTALYYCAKDIQYGNYYYGMDVWGQGTTVTVSSGGGGSGGGGSGGGGSEIVLTQSPATLSLSPGERATLSCRASQSVSSYLAWYQQKPGQAPRLLIYDASNRATGIPARFSGSGSGTDFTLTISSLEPEDFAVYYCQQRSNWPITFGQGTRLEIKRSDPASGAGSGSGSAIELLPVPGAKKSAKLYIPYIILTIIILTIVGFIWLLKVNGCRKYKLNKTESTPVVEEDEMQPYASYTEKNNPLYDTTNKVKASEALQSEVDTDLHTLSHG

SEQ ID NO: 178 - protein, 531 aa, artificial sequence
  Polypeptide encoded by pCLS27699 with CD20 - iTR10A
MALPVTALLLPLALLLHAARPGSGSGAQAAEVQLVESGGGLVQPGRSLRLSCAASGFTFNDYAMHWVRQAPGKGLEWVSTISWNSGSIGYADSVKGRFTISRDNAKKSLYLQMNSLRAEDTALYYCAKDIQYGNYYYGMDVWGQGTTVTVSSGGGGSGGGGSGGGGSEIVLTQSPATLSLSPGERATLSCRASQSVSSYLAWYQQKPGQAPRLLIYDASNRATGIPARFSGSGSGTDFTLTISSLEPEDFAVYYCQQRSNWPITFGQGTRLEIKRSDPASGAGSGSGSAVHKESGNGHNIWVILVVTLVVPLLLVAVLIVCCCIGSGCGGDPKCMDRVCFWRLGLLRGPGAEDNAHNEILSNADSLSTFVSEQQMESQEPADLTGVTVQSPGEAQCLLGPAEAEGSQRRRLLVPANGADPTETLMLFFDKFANIVPFDSWDQLMRQLDLTKNEIDVVRAGTAGPGDALYAMLMKWVNKTGRNASIHTLLDALERMEERHAKEKIQDLLVDSGKFIYLEDGTGSAVSLESHG

SEQ ID NO: 179 - protein, 554 aa, artificial sequence
  Polypeptide encoded by pCLS27700 with CD20 - iTR10B
MALPVTALLLPLALLLHAARPGSGSGAQAAEVQLVESGGGLVQPGRSLRLSCAASGFTFNDYAMHWVRQAPGKGLEWVSTISWNSGSIGYADSVKGRFTISRDNAKKSLYLQMNSLRAEDTALYYCAKDIQYGNYYYGMDVWGQGTTVTVSSGGGGSGGGGSGGGGSEIVLTQSPATLSLSPGERATLSCRASQSVSSYLAWYQQKPGQAPRLLIYDASNRATGIPARFSGSGSGTDFTLTISSLEPEDFAVYYCQQRSNWPITFGQGTRLEIKRSDPASGAGSGSGSAVHKESGTKHSGEAPAVEETVTSSPGTPASPCSLSGIIIGVTVAAVVLIVAVFVCKSLLWKKVLPYLKGICSGGGGDPERVDRSSQRPGAEDNVLNEIVSILQPTQVPEQEMEVQEPAEPTGVNMLSPGESEHLLEPAEAERSQRRRLLVPANEGDPTETLRQCFDDFADLVPFDSWEPLMRKLGLMDNEIKVAKAEAAGHRDTLYTMLIKWVNKTGRDASVHTLLDALETLGERLAKQKIEDHLLSSGKFMYLEGNADSAMSSHG

SEQ ID NO: 180 - protein, 498 aa, artificial sequence
  Polypeptide encoded by pCLS27701 with CD20 - iTR10D
MALPVTALLLPLALLLHAARPGSGSGAQAAEVQLVESGGGLVQPGRSLRLSCAASGFTFNDYAMHWVRQAPGKGLEWVSTISWNSGSIGYADSVKGRFTISRDNAKKSLYLQMNSLRAEDTALYYCAKDIQYGNYYYGMDVWGQGTTVTVSSGGGGSGGGGSGGGGSEIVLTQSPATLSLSPGERATLSCRASQSVSSYLAWYQQKPGQAPRLLIYDASNRATGIPARFSGSGSGTDFTLTISSLEPEDFAVYYCQQRSNWPITFGQGTRLEIKRSDPASGAGSGSGSAKNESAASSTGKTPAAEETVTTILGMLASPYHYLIIIVVLVIILAVVVVGFSCRKKFISYLKGICSGGGGGPERVHRVLFRRRSCPSRVPGAEDNARNETLSNRYLQPTQVSEQEIQGQELAELTGVTVELPEEPQRLLEQAEAEGCQRRRLLVPVNDADSADISTLLDASATLEEGHAKETIQDQLVGSEKLFYEEDEAGSATSCLSHG

SEQ ID NO: 181 - protein, 428 aa, artificial sequence
  Polypeptide encoded by pCLS27702 with CD20 - iCD33
MALPVTALLLPLALLLHAARPGSGSGAQAAEVQLVESGGGLVQPGRSLRLSCAASGFTFNDYAMHWVRQAPGKGLEWVSTISWNSGSIGYADSVKGRFTISRDNAKKSLYLQMNSLRAEDTALYYCAKDIQYGNYYYGMDVWGQGTTVTVSSGGGGSGGGGSGGGGSEIVLTQSPATLSLSPGERATLSCRASQSVSSYLAWYQQKPGQAPRLLIYDASNRATGIPARFSGSGSGTDFTLTISSLEPEDFAVYYCQQRSNWPITFGQGTRLEIKRSDPASGAGSGSGSALNVTYVPQNPTTGIFPGDGSGKQETRAGVVHGAIGGAGVTALLALCLCLIFFIVKTHRRKAARTAVGRNDTHPTTGSASPKHQKKSKLHGPTETSSCSGAAPTVEMDEELHYASLNFHGMNPSKDTSTEYSEVRTQSHG

SEQ ID NO: 182 - protein, 389 aa, artificial sequence
  Polypeptide encoded by pCLS27703 with CD20 - iFCG2B
MALPVTALLLPLALLLHAARPGSGSGAQAAEVQLVESGGGLVQPGRSLRLSCAASGFTFNDYAMHWVRQAPGKGLEWVSTISWNSGSIGYADSVKGRFTISRDNAKKSLYLQMNSLRAEDTALYYCAKDIQYGNYYYGMDVWGQGTTVTVSSGGGGSGGGGSGGGGSEIVLTQSPATLSLSPGERATLSCRASQSVSSYLAWYQQKPGQAPRLLIYDASNRATGIPARFSGSGSGTDFTLTISSLEPEDFAVYYCQQRSNWPITFGQGTRLEIKRSDPASGAGSGSGSAVQAPSSSPMGIIVAVVTGIAVAAIVAAVVALIYCRKKRISALPGYPECREMGETLPEKPANPTNPDEADKVGAENTITYSLLMHPDALEEPDDQNRISHG

SEQ ID NO: 183 - protein, 430 aa, artificial sequence
  Polypeptide encoded by pCLS27704 with CD20 - iFCRL1
MALPVTALLLPLALLLHAARPGSGSGAQAAEVQLVESGGGLVQPGRSLRLSCAASGFTFNDYAMHWVRQAPGKGLEWVSTISWNSGSIGYADSVKGRFTISRDNAKKSLYLQMNSLRAEDTALYYCAKDIQYGNYYYGMDVWGQGTTVTVSSGGGGSGGGGSGGGGSEIVLTQSPATLSLSPGERATLSCRASQSVSSYLAWYQQKPGQAPRLLIYDASNRATGIPARFSGSGSGTDFTLTISSLEPEDFAVYYCQQRSNWPITFGQGTRLEIKRSDPASGAGSGSGSALNFTVPTGARSNHLTSGVIEGLLSTLGPATVALLFCYGLKRKIGRRSARDPLRSLPSPLPQEFTYLNSPTPGQLQPIYENVNVVSGDEVYSLAYYNQPEQESVAAETLGTHMEDKVSLDIYSRLRKANITDVDYEDAMSHG

SEQ ID NO: 184 - protein, 413 aa, artificial sequence
  Polypeptide encoded by pCLS27705 with CD20 - iFCRL2
MALPVTALLLPLALLLHAARPGSGSGAQAAEVQLVESGGGLVQPGRSLRLSCAASGFTFNDYAMHWVRQAPGKGLEWVSTISWNSGSIGYADSVKGRFTISRDNAKKSLYLQMNSLRAEDTALYYCAKDIQYGNYYYGMDVWGQGTTVTVSSGGGGSGGGGSGGGGSEIVLTQSPATLSLSPGERATLSCRASQSVSSYLAWYQQKPGQAPRLLIYDASNRATGIPARFSGSGSGTDFTLTISSLEPEDFAVYYCQQRSNWPITFGQGTRLEIKRSDPASGAGSGSGSAGPDGYRRDLMTAGVLWGLFGVLGFTGVALLLYALFHKISGESSATNEPRGASRPNPQEFTYSSPTPDMEELQPVYVNVGSVDVDVVYSQVWSMQQPESSANIRTLLENKDSQVIYSSVKKSSHG

SEQ ID NO: 185 - protein, 463 aa, artificial sequence
  Polypeptide encoded by pCLS27706 with CD20 - iFCRL3
MALPVTALLLPLALLLHAARPGSGSGAQAAEVQLVESGGGLVQPGRSLRLSCAASGFTFNDYAMHWVRQAPGKGLEWVSTISWNSGSIGYADSVKGRFTISRDNAKKSLYLQMNSLRAEDTALYYCAKDIQYGNYYYGMDVWGQGTTVTVSSGGGGSGGGGSGGGGSEIVLTQSPATLSLSPGERATLSCRASQSVSSYLAWYQQKPGQAPRLLIYDASNRATGIPARFSGSGSGTDFTLTISSLEPEDFAVYYCQQRSNWPITFGQGTRLEIKRSDPASGAGSGSGSAGTSRNRTGLTAAGITGLVLSILVLAAAAALLHYARARRKPGGLSATGTSSHSPSECQEPSSSRPSRIDPQEPTHSKPLAPMELEPMYSNANPGDSNPIYSQIWSIQHTKENSANCPMMHQEHEELTVLYSELKKTHPDDSAGEASSRGRAHEEDDEENYENVPRVLLASDHSHG

SEQ ID NO: 186 - protein, 433 aa, artificial sequence
  Polypeptide encoded by pCLS27707 with CD20 - iFCRL4
MALPVTALLLPLALLLHAARPGSGSGAQAAEVQLVESGGGLVQPGRSLRLSCAASGFTFNDYAMHWVRQAPGKGLEWVSTISWNSGSIGYADSVKGRFTISRDNAKKSLYLQMNSLRAEDTALYYCAKDIQYGNYYYGMDVWGQGTTVTVSSGGGGSGGGGSGGGGSEIVLTQSPATLSLSPGERATLSCRASQSVSSYLAWYQQKPGQAPRLLIYDASNRATGIPARFSGSGSGTDFTLTISSLEPEDFAVYYCQQRSNWPITFGQGTRLEIKRSDPASGAGSGSGSAVTVRETPGNRDGLVAAGATGGLLSALLLAVALLFHCWRRRKSGVGFLGDETRLPPAPGPGESSHSICPAQVELQSLYVDVHPKKGDLVYSEIQTTQLGEEEEANTSRTLLEDKDVSVVYSEVKTQHPDNSAGKISSKDEESSHG

SEQ ID NO: 187 - protein, 435 aa, artificial sequence
  Polypeptide encoded by pCLS27708 with CD20 - iFCRL5
MALPVTALLLPLALLLHAARPGSGSGAQAAEVQLVESGGGLVQPGRSLRLSCAASGFTFNDYAMHWVRQAPGKGLEWVSTISWNSGSIGYADSVKGRFTISRDNAKKSLYLQMNSLRAEDTALYYCAKDIQYGNYYYGMDVWGQGTTVTVSSGGGGSGGGGSGGGGSEIVLTQSPATLSLSPGERATLSCRASQSVSSYLAWYQQKPGQAPRLLIYDASNRATGIPARFSGSGSGTDFTLTISSLEPEDFAVYYCQQRSNWPITFGQGTRLEIKRSDPASGAGSGSGSALYITGLTANRSGPFATGVAGGLLSIAGLAAGALLLYCWLSRKAGRKPASDPARSPPDSDSQEPTYHNVPAWEELQPVYTNANPRGENVVYSEVRIIQEKKKHAVASDPRHLRNKGSPIIYSEVKVASTPVSGSLFLASSAPHRSHG

SEQ ID NO: 188 - protein, 471 aa, artificial sequence
  Polypeptide encoded by pCLS27709 with CD20 - iLIRB2
MALPVTALLLPLALLLHAARPGSGSGAQAAEVQLVESGGGLVQPGRSLRLSCAASGFTFNDYAMHWVRQAPGKGLEWVSTISWNSGSIGYADSVKGRFTISRDNAKKSLYLQMNSLRAEDTALYYCAKDIQYGNYYYGMDVWGQGTTVTVSSGGGGSGGGGSGGGGSEIVLTQSPATLSLSPGERATLSCRASQSVSSYLAWYQQKPGQAPRLLIYDASNRATGIPARFSGSGSGTDFTLTISSLEPEDFAVYYCQQRSNWPITFGQGTRLEIKRSDPASGAGSGSGSAGPSMGSSPPPTGPISTPAGPEDQPLTPTGSDPQSGLGRHLGVVIGILVAVVLLLLLLLLLFLILRHRRQGKHWTSTQRKADFQHPAGAVGPEPTDRGLQWRSSPAADAQEENLYAAVKDTQPEDGVEMDTRAAASEAPQDVTYAQLHSLTLRRKATEPPPSQEREPPAEPSIYATLAIHSHG

SEQ ID NO: 189 - protein, 504 aa, artificial sequence
  Polypeptide encoded by pCLS27710 with CD20 - iLIRB3
MALPVTALLLPLALLLHAARPGSGSGAQAAEVQLVESGGGLVQPGRSLRLSCAASGFTFNDYAMHWVRQAPGKGLEWVSTISWNSGSIGYADSVKGRFTISRDNAKKSLYLQMNSLRAEDTALYYCAKDIQYGNYYYGMDVWGQGTTVTVSSGGGGSGGGGSGGGGSEIVLTQSPATLSLSPGERATLSCRASQSVSSYLAWYQQKPGQAPRLLIYDASNRATGIPARFSGSGSGTDFTLTISSLEPEDFAVYYCQQRSNWPITFGQGTRLEIKRSDPASGAGSGSGSAGHSGGSSLPPTGPPSTPGLGRYLEVLIGVSVAFVLLLFLLLFLLLRRQRHSKHRTSDQRKTDFQRPAGAAETEPKDRGLLRRSSPAADVQEENLYAAVKDTQSEDRVELDSQSPHDEDPQAVTYAPVKHSSPRREMASPPSSLSGEFLDTKDRQVEEDRQMDTEAAASEASQDVTYAQLHSLTLRRKATEPPPSQEGEPPAEPSIYATLAIHSHG

SEQ ID NO: 190 - protein, 522 aa, artificial sequence
  Polypeptide encoded by pCLS27711 with CD20 - iLIRB4
MALPVTALLLPLALLLHAARPGSGSGAQAAEVQLVESGGGLVQPGRSLRLSCAASGFTFNDYAMHWVRQAPGKGLEWVSTISWNSGSIGYADSVKGRFTISRDNAKKSLYLQMNSLRAEDTALYYCAKDIQYGNYYYGMDVWGQGTTVTVSSGGGGSGGGGSGGGGSEIVLTQSPATLSLSPGERATLSCRASQSVSSYLAWYQQKPGQAPRLLIYDASNRATGIPARFSGSGSGTDFTLTISSLEPEDFAVYYCQQRSNWPITFGQGTRLEIKRSDPASGAGSGSGSAGSLEGPRPSPTRSVSTAAGPEDQPLMPTGSVPHSGLRRHWEVLIGVLVVSILLLSLLLFLLLQHWRQGKHRTLAQRQADFQRPPGAAEPEPKDGGLQRRSSPAADVQGENFCAAVKNTQPEDGVEMDTRQSPHDEDPQAVTYAKVKHSRPRREMASPPSPLSGEFLDTKDRQAEEDRQMDTEAAASEAPQDVTYAQLHSFTLRQKATEPPPSQEGASPAEPSVYATLAIHSHG

SEQ ID NO: 191 - protein, 464 aa, artificial sequence
  Polypeptide encoded by pCLS27712 with CD20 - iLIRB5
MALPVTALLLPLALLLHAARPGSGSGAQAAEVQLVESGGGLVQPGRSLRLSCAASGFTFNDYAMHWVRQAPGKGLEWVSTISWNSGSIGYADSVKGRFTISRDNAKKSLYLQMNSLRAEDTALYYCAKDIQYGNYYYGMDVWGQGTTVTVSSGGGGSGGGGSGGGGSEIVLTQSPATLSLSPGERATLSCRASQSVSSYLAWYQQKPGQAPRLLIYDASNRATGIPARFSGSGSGTDFTLTISSLEPEDFAVYYCQQRSNWPITFGQGTRLEIKRSDPASGAGSGSGSAGPSGDPSLSPTGSTPTPGPEDQPLTPTGLDPQSGLGRHLGVVTGVSVAFVLLLFLLLFLLLRHRHQSKHRTSAHFYRPAGAAGPEPKDQGLQKRASPVADIQEEILNAAVKDTQPKDGVEMDARAAASEAPQDVTYAQLHSLTLRREATEPPPSQEREPPAEPSIYAPLAIHSHG

SEQ ID NO: 192 - protein, 422 aa, artificial sequence
  Polypeptide encoded by pCLS27713 with CD20 - iMILR1
MALPVTALLLPLALLLHAARPGSGSGAQAAEVQLVESGGGLVQPGRSLRLSCAASGFTFNDYAMHWVRQAPGKGLEWVSTISWNSGSIGYADSVKGRFTISRDNAKKSLYLQMNSLRAEDTALYYCAKDIQYGNYYYGMDVWGQGTTVTVSSGGGGSGGGGSGGGGSEIVLTQSPATLSLSPGERATLSCRASQSVSSYLAWYQQKPGQAPRLLIYDASNRATGIPARFSGSGSGTDFTLTISSLEPEDFAVYYCQQRSNWPITFGQGTRLEIKRSDPASGAGSGSGSAMPSTGGDSCPFCLKLLLPGLLLLLVVIILILAFWVLPKYKTRKAMRNNVPRDRGDTAMEVGIYANILEKQAKEESVPEVGSRPCVSTAQDEAKHSQELQYATPVFQEVAPREQEACDSYKSGYVYSELNFSHG

SEQ ID NO: 193 - protein, 415 aa, artificial sequence
  Polypeptide encoded by pCLS27714 with CD20 - iMPZL1
MALPVTALLLPLALLLHAARPGSGSGAQAAEVQLVESGGGLVQPGRSLRLSCAASGFTFNDYAMHWVRQAPGKGLEWVSTISWNSGSIGYADSVKGRFTISRDNAKKSLYLQMNSLRAEDTALYYCAKDIQYGNYYYGMDVWGQGTTVTVSSGGGGSGGGGSGGGGSEIVLTQSPATLSLSPGERATLSCRASQSVSSYLAWYQQKPGQAPRLLIYDASNRATGIPARFSGSGSGTDFTLTISSLEPEDFAVYYCQQRSNWPITFGQGTRLEIKRSDPASGAGSGSGSAPGHIRLYVVEKENLPVFPVWVVVGIVTAVVLGLTLLISMILAVLYRRKNSKRDYTGCSTSESLSPVKQAPRKSPSDTEGLVKSLPSGSHQGPVIYAQLDHSGGHHSDKINKSESVVYADIRKNSHG

SEQ ID NO: 194 - protein, 445 aa, artificial sequence
  Polypeptide encoded by pCLS27715 with CD20 - iPILRA
MALPVTALLLPLALLLHAARPGSGSGAQAAEVQLVESGGGLVQPGRSLRLSCAASGFTFNDYAMHWVRQAPGKGLEWVSTISWNSGSIGYADSVKGRFTISRDNAKKSLYLQMNSLRAEDTALYYCAKDIQYGNYYYGMDVWGQGTTVTVSSGGGGSGGGGSGGGGSEIVLTQSPATLSLSPGERATLSCRASQSVSSYLAWYQQKPGQAPRLLIYDASNRATGIPARFSGSGSGTDFTLTISSLEPEDFAVYYCQQRSNWPITFGQGTRLEIKRSDPASGAGSGSGSAQAVTTTTQRPSSMTTTWRLSSTTTTTGLRVTQGKRRSDSWHISLETAVGVAVAVTVLGIMILGLICLLRWRRRKGQQRTKATTPAREPFQNTEEPYENIRNEGQNTDPKLNPKDDGIVYASLALSSSTSPKAPPSHRPLKSPQNETLYSVLKASHG

SEQ ID NO: 195 - protein, 381 aa, artificial sequence
  Polypeptide encoded by pCLS27716 with CD20 - iPVR
MALPVTALLLPLALLLHAARPGSGSGAQAAEVQLVESGGGLVQPGRSLRLSCAASGFTFNDYAMHWVRQAPGKGLEWVSTISWNSGSIGYADSVKGRFTISRDNAKKSLYLQMNSLRAEDTALYYCAKDIQYGNYYYGMDVWGQGTTVTVSSGGGGSGGGGSGGGGSEIVLTQSPATLSLSPGERATLSCRASQSVSSYLAWYQQKPGQAPRLLIYDASNRATGIPARFSGSGSGTDFTLTISSLEPEDFAVYYCQQRSNWPITFGQGTRLEIKRSDPASGAGSGSGSAVKEGPPSEHSGISRNAIIFLVLGILVFLILLGIGIYFYWSKCSREVLWHCHLCPSSTEHASASANGHVSYSAVSRENSSSQDPQTEGTRSHG

SEQ ID NO: 196 - protein, 548 aa, artificial sequence
  Polypeptide encoded by pCLS27717 with CD20 - iSIG10
MALPVTALLLPLALLLHAARPGSGSGAQAAEVQLVESGGGLVQPGRSLRLSCAASGFTFNDYAMHWVRQAPGKGLEWVSTISWNSGSIGYADSVKGRFTISRDNAKKSLYLQMNSLRAEDTALYYCAKDIQYGNYYYGMDVWGQGTTVTVSSGGGGSGGGGSGGGGSEIVLTQSPATLSLSPGERATLSCRASQSVSSYLAWYQQKPGQAPRLLIYDASNRATGIPARFSGSGSGTDFTLTISSLEPEDFAVYYCQQRSNWPITFGQGTRLEIKRSDPASGAGSGSGSAVHYSPKLLGPSCSWEAEGLHCSCSSQASPAPSLRWWLGEELLEGNSSQDSFEVTPSSAGPWANSSLSLHGGLSSGLRLRCEAWNVHGAQSGSILQLPDKKGLISTAFSNGAFLGIGITALLFLCLALIIMKILPKRRTQTETPRPRFSRHSTILDYINVVPTAGPLAQKRNQKATPNSPRTPLPPGAPSPESKKNQKKQYQLPSFPEPKSSTQAPESQESQEELHYATLNFPGVRPRPEARMPKGTQADYAEVKFQSHG

SEQ ID NO: 197 - protein, 538 aa, artificial sequence
  Polypeptide encoded by pCLS27718 with CD20 - iSIG11
MALPVTALLLPLALLLHAARPGSGSGAQAAEVQLVESGGGLVQPGRSLRLSCAASGFTFNDYAMHWVRQAPGKGLEWVSTISWNSGSIGYADSVKGRFTISRDNAKKSLYLQMNSLRAEDTALYYCAKDIQYGNYYYGMDVWGQGTTVTVSSGGGGSGGGGSGGGGSEIVLTQSPATLSLSPGERATLSCRASQSVSSYLAWYQQKPGQAPRLLIYDASNRATGIPARFSGSGSGTDFTLTISSLEPEDFAVYYCQQRSNWPITFGQGTRLEIKRSDPASGAGSGSGSAVHYPPQLLGPSCSWEAEGLHCSCSSQASPAPSLRWWLGEELLEGNSSQGSFEVTPSSAGPWANSSLSLHGGLSSGLRLRCKAWNVHGAQSGSVFQLLPGKLEHGGGLGLGAALGAGVAALLAFCSCLVVFRVKICRKEARKRAAAEQDVPSTLGPISQGHQHECSAGSSQDHPPPGAATYTPGKGEEQELHYASLSFQGLRLWEPADQEAPSTTEYSEIKIHTGQPLRGPGFGLQLEREMSGMVPKSHG

SEQ ID NO: 198 - protein, 425 aa, artificial sequence
  Polypeptide encoded by pCLS27719 with CD20 - iSIG12
MALPVTALLLPLALLLHAARPGSGSGAQAAEVQLVESGGGLVQPGRSLRLSCAASGFTFNDYAMHWVRQAPGKGLEWVSTISWNSGSIGYADSVKGRFTISRDNAKKSLYLQMNSLRAEDTALYYCAKDIQYGNYYYGMDVWGQGTTVTVSSGGGGSGGGGSGGGGSEIVLTQSPATLSLSPGERATLSCRASQSVSSYLAWYQQKPGQAPRLLIYDASNRATGIPARFSGSGSGTDFTLTISSLEPEDFAVYYCQQRSNWPITFGQGTRLEIKRSDPASGAGSGSGSALQNEYTGKMRPISGVTLGAFGGAGATALVFLYFCIIFVVVRSCRKKSARPAVGVGDTGMEDANAVRGSASQGPLIESPADDSPPHHAPPALATPSPEEGEIQYASLSFHKARPQYPQEQEAIGYEYSEINIPKSHG

SEQ ID NO: 199 - protein, 513 aa, artificial sequence
  Polypeptide encoded by pCLS27720 with CD20 - iSIGL5
MALPVTALLLPLALLLHAARPGSGSGAQAAEVQLVESGGGLVQPGRSLRLSCAASGFTFNDYAMHWVRQAPGKGLEWVSTISWNSGSIGYADSVKGRFTISRDNAKKSLYLQMNSLRAEDTALYYCAKDIQYGNYYYGMDVWGQGTTVTVSSGGGGSGGGGSGGGGSEIVLTQSPATLSLSPGERATLSCRASQSVSSYLAWYQQKPGQAPRLLIYDASNRATGIPARFSGSGSGTDFTLTISSLEPEDFAVYYCQQRSNWPITFGQGTRLEIKRSDPASGAGSGSGSAVYSLPQLLGPSCSWEAEGLHCRCSFRAWPAPSLCWRLEEKPLEGNSSQGSFKVNSSSPGPWANSSLILHGGLNSDLKVSCKAWNIYGSQSGSVLLLQGRSNLGTGVVPAALGGAGVMALLCICLCLIFFLIVKARRKQAAGRPEKMDDEDPIMGTITSGSRKKPWPDSPGDQASPPGDAPPLEEQKELHYASLSFSEMKSREPKDQEAPSTTEYSEIKTSKSHG

SEQ ID NO: 200 - protein, 412 aa, artificial sequence
  Polypeptide encoded by pCLS27721 with CD20 - iSIGL6
MALPVTALLLPLALLLHAARPGSGSGAQAAEVQLVESGGGLVQPGRSLRLSCAASGFTFNDYAMHWVRQAPGKGLEWVSTISWNSGSIGYADSVKGRFTISRDNAKKSLYLQMNSLRAEDTALYYCAKDIQYGNYYYGMDVWGQGTTVTVSSGGGGSGGGGSGGGGSEIVLTQSPATLSLSPGERATLSCRASQSVSSYLAWYQQKPGQAPRLLIYDASNRATGIPARFSGSGSGTDFTLTISSLEPEDFAVYYCQQRSNWPITFGQGTRLEIKRSDPASGAGSGSGSALFVHWKPEGRAGGVLGAVWGASITTLVFLCVCFIFRVKTRRKKAAQPVQNTDDVNPVMVSGSRGHQHQFQTGIVSDHPAEAGPISEDEQELHYAVLHFHKVQPQEPKVTDTEYSEIKIHKSHG

SEQ ID NO: 201 - protein, 423 aa, artificial sequence
  Polypeptide encoded by pCLS27722 with CD20 - iSIGL7
MALPVTALLLPLALLLHAARPGSGSGAQAAEVQLVESGGGLVQPGRSLRLSCAASGFTFNDYAMHWVRQAPGKGLEWVSTISWNSGSIGYADSVKGRFTISRDNAKKSLYLQMNSLRAEDTALYYCAKDIQYGNYYYGMDVWGQGTTVTVSSGGGGSGGGGSGGGGSEIVLTQSPATLSLSPGERATLSCRASQSVSSYLAWYQQKPGQAPRLLIYDASNRATGIPARFSGSGSGTDFTLTISSLEPEDFAVYYCQQRSNWPITFGQGTRLEIKRSDPASGAGSGSGSALQQEYTGKMRPVSGVLLGAVGGAGATALVFLSFCVIFIVVRSCRKKSARPAADVGDIGMKDANTIRGSASQGNLTESWADDNPRHHGLAAHSSGEEREIQYAPLSFHKGEPQDLSGQEATNNEYSEIKIPKSHG

SEQ ID NO: 202 - protein, 447 aa, artificial sequence
  Polypeptide encoded by pCLS27723 with CD20 - iSIGL8
MALPVTALLLPLALLLHAARPGSGSGAQAAEVQLVESGGGLVQPGRSLRLSCAASGFTFNDYAMHWVRQAPGKGLEWVSTISWNSGSIGYADSVKGRFTISRDNAKKSLYLQMNSLRAEDTALYYCAKDIQYGNYYYGMDVWGQGTTVTVSSGGGGSGGGGSGGGGSEIVLTQSPATLSLSPGERATLSCRASQSVSSYLAWYQQKPGQAPRLLIYDASNRATGIPARFSGSGSGTDFTLTISSLEPEDFAVYYCQQRSNWPITFGQGTRLEIKRSDPASGAGSGSGSALQNEGTGTSRPVSQVTLAAVGGAGATALAFLSFCIIFIIVRSCRKKSARPAAGVGDTGMEDAKAIRGSASQGPLTESWKDGNPLKKPPPAVAPSSGEEGELHYATLSFHKVKPQDPQGQEATDSEYSEIKIHKRETAETQACLRNHNPSSKEVRGSHG

SEQ ID NO: 203 - protein, 419 aa, artificial sequence
  Polypeptide encoded by pCLS27724 with CD20 - iSIGL9
MALPVTALLLPLALLLHAARPGSGSGAQAAEVQLVESGGGLVQPGRSLRLSCAASGFTFNDYAMHWVRQAPGKGLEWVSTISWNSGSIGYADSVKGRFTISRDNAKKSLYLQMNSLRAEDTALYYCAKDIQYGNYYYGMDVWGQGTTVTVSSGGGGSGGGGSGGGGSEIVLTQSPATLSLSPGERATLSCRASQSVSSYLAWYQQKPGQAPRLLIYDASNRATGIPARFSGSGSGTDFTLTISSLEPEDFAVYYCQQRSNWPITFGQGTRLEIKRSDPASGAGSGSGSALQSKATSGVTQGVVGGAGATALVFLSFCVIFVVVRSCRKKSARPAAGVGDTGIEDANAVRGSASQGPLTEPWAEDSPPDQPPPASARSSVGEGELQYASLSFQMVKPWDSRGQEATDTEYSEIKIHRSHG

SEQ ID NO: 204 - protein, 435 aa, artificial sequence
  Polypeptide encoded by
MALPVTALLLPLALLLHAARPGSGSGAQAAEVQLVESGGGLVQPGRSLRLSCAASGFTFNDYAMHWVRQAPGKGLEWVSTISWNSGSIGYADSVKGRFTISRDNAKKSLYLQMNSLRAEDTALYYCAKDIQYGNYYYGMDVWGQGTTVTVSSGGGGSGGGGSGGGGSEIVLTQSPATLSLSPGERATLSCRASQSVSSYLAWYQQKPGQAPRLLIYDASNRATGIPARFSGSGSGTDFTLTISSLEPEDFAVYYCQQRSNWPITFGQGTRLEIKRSDPASGAGSGSGSAPYEWSKSSDPLLVSVTGNPSNSWPSPTEPSSKTGNPRHLHILIGTSVVIILFILLFFLLHRWCSNKKNAAVMDQESAGNRTANSEDSDEQDPQEVTYTQLNHCVFTQRKITRPSQRPKTPPTDIIVYTELPNAESRSKVVSCPSHG

SEQ ID NO: 205 - protein, 435 aa, artificial sequence
  Polypeptide encoded by pCLS27726 with CD20 - iKI2L2
MALPVTALLLPLALLLHAARPGSGSGAQAAEVQLVESGGGLVQPGRSLRLSCAASGFTFNDYAMHWVRQAPGKGLEWVSTISWNSGSIGYADSVKGRFTISRDNAKKSLYLQMNSLRAEDTALYYCAKDIQYGNYYYGMDVWGQGTTVTVSSGGGGSGGGGSGGGGSEIVLTQSPATLSLSPGERATLSCRASQSVSSYLAWYQQKPGQAPRLLIYDASNRATGIPARFSGSGSGTDFTLTISSLEPEDFAVYYCQQRSNWPITFGQGTRLEIKRSDPASGAGSGSGSAPYEWSNSSDPLLVSVIGNPSNSWPSPTEPSSKTGNPRHLHILIGTSVVIILFILLFFLLHRWCSNKKNAAVMDQESAGNRTANSEDSDEQDPQEVTYTQLNHCVFTQRKITRPSQRPKTPPTDIIVYAELPNAESRSKVVSCPSHG

SEQ ID NO: 206 - protein, 428 aa, artificial sequence
  Polypeptide encoded by pCLS27727 with CD20 - iKI2L3
MALPVTALLLPLALLLHAARPGSGSGAQAAEVQLVESGGGLVQPGRSLRLSCAASGFTFNDYAMHWVRQAPGKGLEWVSTISWNSGSIGYADSVKGRFTISRDNAKKSLYLQMNSLRAEDTALYYCAKDIQYGNYYYGMDVWGQGTTVTVSSGGGGSGGGGSGGGGSEIVLTQSPATLSLSPGERATLSCRASQSVSSYLAWYQQKPGQAPRLLIYDASNRATGIPARFSGSGSGTDFTLTISSLEPEDFAVYYCQQRSNWPITFGQGTRLEIKRSDPASGAGSGSGSAPYEWSNSSDPLLVSVTGNPSNSWPSPTEPSSETGNPRHLHVLIGTSVVIILFILLLFFLLHRWCCNKKNAVVMDQEPAGNRTVNREDSDEQDPQEVTYAQLNHCVFTQRKITRPSQRPKTPPTDIIVYTELPNAEPSHG

SEQ ID NO: 207 - protein, 467 aa, artificial sequence
  Polypeptide encoded by pCLS27728 with CD20 - iKI2L4
MALPVTALLLPLALLLHAARPGSGSGAQAAEVQLVESGGGLVQPGRSLRLSCAASGFTFNDYAMHWVRQAPGKGLEWVSTISWNSGSIGYADSVKGRFTISRDNAKKSLYLQMNSLRAEDTALYYCAKDIQYGNYYYGMDVWGQGTTVTVSSGGGGSGGGGSGGGGSEIVLTQSPATLSLSPGERATLSCRASQSVSSYLAWYQQKPGQAPRLLIYDASNRATGIPARFSGSGSGTDFTLTISSLEPEDFAVYYCQQRSNWPITFGQGTRLEIKRSDPASGAGSGSGSAPYEWSDASDPLPVSVTGNPSSSWPSPTEPSFKTGIARHLHAVIRYSVAIILFTILPFFLLHRWCSKKKDAAVMNQEPAGHRTVNREDSDEQDPQEVTYAQLDHCIFTQRKITGPSQRSKRPSTDTSVCIELPNAEPRALSPAHEHHSQALMGSSRETTALSQTQLASSHVPAAGISHG

SEQ ID NO: 208 - protein, 467 aa, artificial sequence
  Polypeptide encoded by pCLS27729 with CD20 - iKI2LA
MALPVTALLLPLALLLHAARPGSGSGAQAAEVQLVESGGGLVQPGRSLRLSCAASGFTFNDYAMHWVRQAPGKGLEWVSTISWNSGSIGYADSVKGRFTISRDNAKKSLYLQMNSLRAEDTALYYCAKDIQYGNYYYGMDVWGQGTTVTVSSGGGGSGGGGSGGGGSEIVLTQSPATLSLSPGERATLSCRASQSVSSYLAWYQQKPGQAPRLLIYDASNRATGIPARFSGSGSGTDFTLTISSLEPEDFAVYYCQQRSNWPITFGQGTRLEIKRSDPASGAGSGSGSAPYEWSDPSDPLLVSVTGNSSSSSSSPTEPSSKTGIRRHLHILIGTSVAIILFIILFFFLLHCCCSNKKNAAVMDQEPAGDRTVNREDSDDQDPQEVTYAQLDHCVFTQTKITSPSQRPKTPPTDTTMYMELPNAKPRSLSPAHKHHSQALRGSSRETTALSQNRVASSHVPAAGISHG

SEQ ID NO: 209 - protein, 436 aa, artificial sequence
  Polypeptide encoded by pCLS27730 with CD20 - iKI3L1
MALPVTALLLPLALLLHAARPGSGSGAQAAEVQLVESGGGLVQPGRSLRLSCAASGFTFNDYAMHWVRQAPGKGLEWVSTISWNSGSIGYADSVKGRFTISRDNAKKSLYLQMNSLRAEDTALYYCAKDIQYGNYYYGMDVWGQGTTVTVSSGGGGSGGGGSGGGGSEIVLTQSPATLSLSPGERATLSCRASQSVSSYLAWYQQKPGQAPRLLIYDASNRATGIPARFSGSGSGTDFTLTISSLEPEDFAVYYCQQRSNWPITFGQGTRLEIKRSDPASGAGSGSGSAPYEWSDPSDPLLVSVTGNPSSSWPSPTEPSSKSGNPRHLHILIGTSVVIILFILLLFFLLHLWCSNKKNAAVMDQEPAGNRTANSEDSDEQDPEEVTYAQLDHCVFTQRKITRPSQRPKTPPTDTILYTELPNAKPRSKVVSCPSHG

SEQ ID NO: 210 - protein, 447 aa, artificial sequence
  Polypeptide encoded by pCLS27731 with CD20 - iKI3L2
MALPVTALLLPLALLLHAARPGSGSGAQAAEVQLVESGGGLVQPGRSLRLSCAASGFTFNDYAMHWVRQAPGKGLEWVSTISWNSGSIGYADSVKGRFTISRDNAKKSLYLQMNSLRAEDTALYYCAKDIQYGNYYYGMDVWGQGTTVTVSSGGGGSGGGGSGGGGSEIVLTQSPATLSLSPGERATLSCRASQSVSSYLAWYQQKPGQAPRLLIYDASNRATGIPARFSGSGSGTDFTLTISSLEPEDFAVYYCQQRSNWPITFGQGTRLEIKRSDPASGAGSGSGSAPCVWSNSSDPLLVSVTGNPSSSWPSPTEPSSKSGICRHLHVLIGTSVVIFLFILLLFFLLYRWCSNKKNAAVMDQEPAGDRTVNRQDSDEQDPQEVTYAQLDHCVFIQRKISRPSQRPKTPLTDTSVYTELPNAEPRSKVVSCPRAPQSGLEGVFSHG

SEQ ID NO: 211 - protein, 407 aa, artificial sequence
  Polypeptide encoded by pCLS27732 with CD20 - iKI3L3
MALPVTALLLPLALLLHAARPGSGSGAQAAEVQLVESGGGLVQPGRSLRLSCAASGFTFNDYAMHWVRQAPGKGLEWVSTISWNSGSIGYADSVKGRFTISRDNAKKSLYLQMNSLRAEDTALYYCAKDIQYGNYYYGMDVWGQGTTVTVSSGGGGSGGGGSGGGGSEIVLTQSPATLSLSPGERATLSCRASQSVSSYLAWYQQKPGQAPRLLIYDASNRATGIPARFSGSGSGTDFTLTISSLEPEDFAVYYCQQRSNWPITFGQGTRLEIKRSDPASGAGSGSGSASFRALPHAWSDPSDPLPVSVTGNSRYLHALIGTSVVIIPFAILLFFLLHRWCANKKNAVVMDQEPAGNRTVNREDSDEQDPQEVTYAQLNHCVFTQRKITRPSQRPKTPPTDTSVSHG

SEQ ID NO: 212 - protein, 439 aa, artificial sequence
  Polypeptide encoded by pCLS27733 with CD20 - iPECA1
MALPVTALLLPLALLLHAARPGSGSGAQAAEVQLVESGGGLVQPGRSLRLSCAASGFTFNDYAMHWVRQAPGKGLEWVSTISWNSGSIGYADSVKGRFTISRDNAKKSLYLQMNSLRAEDTALYYCAKDIQYGNYYYGMDVWGQGTTVTVSSGGGGSGGGGSGGGGSEIVLTQSPATLSLSPGERATLSCRASQSVSSYLAWYQQKPGQAPRLLIYDASNRATGIPARFSGSGSGTDFTLTISSLEPEDFAVYYCQQRSNWPITFGQGTRLEIKRSDPASGAGSGSGSAVRVILAPWKKGLIAVVIIGVIIALLIIAAKCYFLRKAKAKQMPVEMSRPAVPLLNSNNEKMSDPNMEANSHYGHNDDVGNHAMKPINDNKEPLNSDVQYTEVQVSSAESHKDLGKKDTETVYSEVRKAVPDAVESRYSRTEGSLDGTSHG

SEQ ID NO: 213 - protein, 741 aa, artificial sequence
  Polypeptide encoded by pCLS27234 with BFP-2A-CD20CAR
MSELIKENMHMKLYMEGTVDNHHFKCTSEGEGKPYEGTQTMRIKVVEGGPLPFAFDILATSFLYGSKTFINHTQGIPDFFKQSFPEGFTWERVTTYEDGGVLTATQDTSLQDGCLIYNVKIRGVNFTSNGPVMQKKTLGWEAFTETLYPADGGLEGRNDMALKLVGGSHLIANIKTTYRSKKPAKNLKMPGVYYVDYRLERIKEANNETYVEQHEVAVARYCDLPSKLGHKLNRAEGRGSLLTCGDVEENPGPMALPVTALLLPLALLLHAARPEVQLVESGGGLVQPGRSLRLSCAASGFTFNDYAMHWVRQAPGKGLEWVSTISWNSGSIGYADSVKGRFTISRDNAKKSLYLQMNSLRAEDTALYYCAKDIQYGNYYYGMDVWGQGTTVTVSSGGGGSGGGGSGGGGSEIVLTQSPATLSLSPGERATLSCRASQSVSSYLAWYQQKPGQAPRLLIYDASNRATGIPARFSGSGSGTDFTLTISSLEPEDFAVYYCQQRSNWPITFGQGTRLEIKTTTPAPRPPTPAPTIASQPLSLRPEACRPAAGGAVHTRGLDFACDIYIWAPLAGTCGVLLLSLVITLYCKRGRKKLLYIFKQPFMRPVQTTQEEDGCSCRFPEEEEGGCELRVKFSRSADAPAYQQGQNQLYNELNLGRREEYDVLDKRRGRDPEMGGKPRRKNPQEGLYNELQKDKMAEAYSEIGMKGERRRGKGHDGLYQGLSTATKDTYDALHMQALPPR

SEQ ID NO: 214 - protein, 792 aa, artificial sequence
  Polypeptide encoded by pCLS28811 with PSMA_iTR10A_2A_EGFP
MALPVTALLLPLALLLHAARPGSGSGAQAAEVQLQQSGPELVKPGTSVRISCKTSGYTFTEYTIHWVKQSHGKSLEWIGNINPNNGGTTYNQKFEDKATLTVDKSSSTAYMELRSLTSEDSAVYYCAAGWNFDYWGQGTTVTVSSGGGGSGGGGSGGGGSDIVMTQSHKFMSTSVGDRVSIICKASQDVGTAVDWYQQKPGQSPKLLIYWASTRHTGVPDRFTGSGSGTDFTLTITNVQSEDLADYFCQQYNSYPLTFGAGTMLDLKRAAARSDPASGAGSGSGSAVHKESGNGHNIWVILVVTLVVPLLLVAVLIVCCCIGSGCGGDPKCMDRVCFWRLGLLRGPGAEDNAHNEILSNADSLSTFVSEQQMESQEPADLTGVTVQSPGEAQCLLGPAEAEGSQRRRLLVPANGADPTETLMLFFDKFANIVPFDSWDQLMRQLDLTKNEIDVVRAGTAGPGDALYAMLMKWVNKTGRNASIHTLLDALERMEERHAKEKIQDLLVDSGKFIYLEDGTGSAVSLESHGGSGEGRGSLLTCGDVEENPGPHMVSKGEELFTGVVPILVELDGDVNGHKFSVSGEGEGDATYGKLTLKFICTTGKLPVPWPTLVTTLTYGVQCFSRYPDHMKQHDFFKSAMPEGYVQERTIFFKDDGNYKTRAEVKFEGDTLVNRIELKGIDFKEDGNILGHKLEYNYNSHNVYIMADKQKNGIKVNFKIRHNIEDGSVQLADHYQQNTPIGDGPVLLPDNHYLSTQSALSKDPNEKRDHMVLLEFVTAAGITLGMDELYKAAD

SEQ ID NO: 215 - protein, 670 aa, artificial sequence
  Polypeptide encoded by pCLS27801 with PSMA_PD1_2A_EGFP
MALPVTALLLPLALLLHAEVQLQQSGPELVKPGTSVRISCKTSGYTFTEYTIHWVKQSHGKSLEWIGNINPNNGGTTYNQKFEDKATLTVDKSSSTAYMELRSLTSEDSAVYYCAAGWNFDYWGQGTTVTVSSGGGGSGGGGSGGGGSDIVMTQSHKFMSTSVGDRVSIICKASQDVGTAVDWYQQKPGQSPKLLIYWASTRHTGVPDRFTGSGSGTDFTLTITNVQSEDLADYFCQQYNSYPLTFGAGTMLDLKRAAATERRAEVPTAHPSPSPRPAGQFQTLVVGVVGGLLGSLVLLVWVLAVICSRAARGTIGARRTGQPLKEDPSAVPVFSVDYGELDFQWREKTPEPPVPCVPEQTEYATIVFPSGMGTSSPARRGSADGPRSAQPLRPEDGHCSWPLSHGGSGEGRGSLLTCGDVEENPGPHMVSKGEELFTGVVPILVELDGDVNGHKFSVSGEGEGDATYGKLTLKFICTTGKLPVPWPTLVTTLTYGVQCFSRYPDHMKQHDFFKSAMPEGYVQERTIFFKDDGNYKTRAEVKFEGDTLVNRIELKGIDFKEDGNILGHKLEYNYNSHNVYIMADKQKNGIKVNFKIRHNIEDGSVQLADHYQQNTPIGDGPVLLPDNHYLSTQSALSKDPNEKRDHMVLLEFVTAAGITLGMDELYKAAD

SEQ ID NO: 216 - protein, 815 aa, artificial sequence
  Polypeptide encoded by pCLS28812 with PSMA_iTR10B_2A_EGFP
MALPVTALLLPLALLLHAARPGSGSGAQAAEVQLQQSGPELVKPGTSVRISCKTSGYTFTEYTIHWVKQSHGKSLEWIGNINPNNGGTTYNQKFEDKATLTVDKSSSTAYMELRSLTSEDSAVYYCAAGWNFDYWGQGTTVTVSSGGGGSGGGGSGGGGSDIVMTQSHKFMSTSVGDRVSIICKASQDVGTAVDWYQQKPGQSPKLLIYWASTRHTGVPDRFTGSGSGTDFTLTITNVQSEDLADYFCQQYNSYPLTFGAGTMLDLKRAAARSDPASGAGSGSGSAVHKESGTKHSGEAPAVEETVTSSPGTPASPCSLSGIIIGVTVAAVVLIVAVFVCKSLLWKKVLPYLKGICSGGGGDPERVDRSSQRPGAEDNVLNEIVSILQPTQVPEQEMEVQEPAEPTGVNMLSPGESEHLLEPAEAERSQRRRLLVPANEGDPTETLRQCFDDFADLVPFDSWEPLMRKLGLMDNEIKVAKAEAAGHRDTLYTMLIKWVNKTGRDASVHTLLDALETLGERLAKQKIEDHLLSSGKFMYLEGNADSAMSSHGGSGEGRGSLLTCGDVEENPGPHMVSKGEELFTGVVPILVELDGDVNGHKFSVSGEGEGDATYGKLTLKFICTTGKLPVPWPTLVTTLTYGVQCFSRYPDHMKQHDFFKSAMPEGYVQERTIFFKDDGNYKTRAEVKFEGDTLVNRIELKGIDFKEDGNILGHKLEYNYNSHNVYIMADKQKNGIKVNFKIRHNIEDGSVQLADHYQQNTPIGDGPVLLPDNHYLSTQSALSKDPNEKRDHMVLLEFVTAAGITLGMDELYKAAD

SEQ ID NO: 217 - protein, 759 aa, artificial sequence
  Polypeptide encoded by pCLS28813 with PSMA_iTR10D_2A_EGFP
MALPVTALLLPLALLLHAARPGSGSGAQAAEVQLQQSGPELVKPGTSVRISCKTSGYTFTEYTIHWVKQSHGKSLEWIGNINPNNGGTTYNQKFEDKATLTVDKSSSTAYMELRSLTSEDSAVYYCAAGWNFDYWGQGTTVTVSSGGGGSGGGGSGGGGSDIVMTQSHKFMSTSVGDRVSIICKASQDVGTAVDWYQQKPGQSPKLLIYWASTRHTGVPDRFTGSGSGTDFTLTITNVQSEDLADYFCQQYNSYPLTFGAGTMLDLKRAAARSDPASGAGSGSGSAKNESAASSTGKTPAAEETVTTILGMLASPYHYLIIIVVLVIILAVVVVGFSCRKKFISYLKGICSGGGGGPERVHRVLFRRRSCPSRVPGAEDNARNETLSNRYLQPTQVSEQEIQGQELAELTGVTVELPEEPQRLLEQAEAEGCQRRRLLVPVNDADSADISTLLDASATLEEGHAKETIQDQLVGSEKLFYEEDEAGSATSCLSHGGSGEGRGSLLTCGDVEENPGPHMVSKGEELFTGVVPILVELDGDVNGHKFSVSGEGEGDATYGKLTLKFICTTGKLPVPWPTLVTTLTYGVQCFSRYPDHMKQHDFFKSAMPEGYVQERTIFFKDDGNYKTRAEVKFEGDTLVNRIELKGIDFKEDGNILGHKLEYNYNSHNVYIMADKQKNGIKVNFKIRHNIEDGSVQLADHYQQNTPIGDGPVLLPDNHYLSTQSALSKDPNEKRDHMVLLEFVTAAGITLGMDELYKAAD

SEQ ID NO: 218 - protein, 671 aa, artificial sequence
  Polypeptide encoded by pCLS23856 with RQR8-2A-CD19CAR
MLTSLLCWMALCLLGADHADACPYSNPSLCSGGGGSELPTQGTFSNVSTNVSPAKPTTTACPYSNPSLCSGGGGSPAPRPPTPAPTIASQPLSLRPEACRPAAGGAVHTRGLDFACDIYIWAPLAGTCGVLLLSLVITLYCNHRNRRRVCKCPRPVVRAEGRGSLLTCGDVEENPGPMETDTLLLWVLLLWVPGSTGDIQMTQTTSSLSASLGDRVTISCRASQDISKYLNWYQQKPDGTVKLLIYHTSRLHSGVPSRFSGSGSGTDYSLTISNLEQEDIATYFCQQGNTLPYTFGGGTKLEITKAGGGGSGGGGSGGGGSGGGGSEVKLQESGPGLVAPSQSLSVTCTVSGVSLPDYGVSWIRQPPRKGLEWLGVIWGSETTYYNSALKSRLTIIKDNSKSQVFLKMNSLQTDDTAIYYCAKHYYYGGSYAMDYWGQGTSVTVSSDPTTTPAPRPPTPAPTIASQPLSLRPEACRPAAGGAVHTRGLDFACDIYIWAPLAGTCGVLLLSLVITLYCKRGRKKLLYIFKQPFMRPVQTTQEEDGCSCRFPEEEEGGCELRVKFSRSADAPAYQQGQNQLYNELNLGRREEYDVLDKRRGRDPEMGGKPRRKNPQEGLYNELQKDKMAEAYSEIGMKGERRRGKGHDGLYQGLSTATKDTYDALHMQALPPR

SEQ ID NO: 219 - protein, 288 aa, Homo sapiens
  human PD1
MQIPQAPWPVVWAVLQLGWRPGWFLDSPDRPWNPPTFSPALLVVTEGDNATFTCSFSNTSESFVLNWYRMSPSNQTDKLAAFPEDRSQPGQDCRFRVTQLPNGRDFHMSVVRARRNDSGTYLCGAISLAPKAQIKESLRAELRVTERRAEVPTAHPSPSPRPAGQFQTLVVGVVGGLLGSLVLLVWVLAVICSRAARGTIGARRTGQPLKEDPSAVPVFSVDYGELDFQWREKTPEPPVPCVPEQTEYATIVFPSGMGTSSPARRGSADGPRSAQPLRPEDGHCSWPL

1. An inhibitory chimeric antigen receptor (N-CAR) comprising:
an extracellular domain comprising an antigen binding domain;
a transmembrane domain; and
an intracellular domain;
wherein said N-CAR comprises a polypeptide sequence involved in inducing an inhibitory transduction signal,
said polypeptide sequence comprises at least one sequence from a Tumor-necrosis-factor related apoptosis inducing ligand (TRAIL) receptor or at least one sequence from a CD200 receptor 1.

2. The N-CAR according to claim 1, comprising a polypeptide sequence from a Tumor-necrosis-factor related apoptosis inducing ligand (TRAIL) receptor.

3. The N-CAR according to claim 1, comprising at least one polypeptide sequence from a polypeptide sequence selected from SEQ ID NO: 33 (human TR10D), SEQ ID NO: 34 (human TR10A) or SEQ ID NO: 35 (human TR10B) or fragments thereof.

4. The N-CAR according to claim 1, wherein said polypeptide sequence has more than 80% sequence identity with a sequence from SEQ ID NO: 33, SEQ ID NO: 34 or SEQ ID NO: 35 or a fragments thereof.

5. The N-CAR according to claim 1, comprising at least one of the following polypeptide sequences: amino acids 181-386 from SEQ ID NO: 33 (human TR10D), amino acids 230-468 from SEQ ID NO: 34 (human TR10A) or of amino acids 179-440 from SEQ ID NO: 35 (human TR10B), or a fragments thereof.

6. The N-CAR according to claim 1, wherein said antigen binding domain binds to a cell surface antigen N, N being not expressed on a cancerous cell and N being expressed on a non-cancerous cell or a healthy cell, said non-cancerous cell or a healthy cell also expressing a P antigen, said P antigen being also expressed or over expressed on a cancerous cell.

7. The N-CAR according to claim 1, wherein said antigen binding domain binds to at least one cell surface antigen N selected from CD56, CD205, CD83, CD206, CD200, CD36, troponin C, beta-1 integrin, CCKBR, GALR1 CUBN, CD4, CD20, CD22, CD25, MUC1, CD19, or PSMA.

8. A vector encoding a N-CAR according to claim 1.

9. An immune cell comprising a P-CAR comprising:
an extracellular domain comprising an antigen binding domain;
a transmembrane domain; and
an intracellular domain;
and a N-CAR according to claim 1.

10. The immune cell according to claim 9, wherein at least one gene encoding a TCR alpha or a TCR beta subunit is inactivated.

11. The immune cell according to claim 9 wherein at least one gene encoding a TCR and a gene encoding a deoxycytidine kinase (dck) are inactivated.

12. The immune cell according to claim 11, wherein the TCR and dck genes are inactivated by deletion using an endonuclease.

13. A method of treating or preventing a haematological cancer condition, comprising administering to a subject in need thereof a therapeutically effective amount of the immune cell according to claim 12.

14. The method according to claim 13, wherein said haematological cancer is leukemia or myeloma.

15. A method of engineering an immune cell according to claim 9 comprising:
(a) Providing an immune cell comprising optionally deleting a candidate gene, said candidate gene being TCRA or dCK;
(b) Expressing a N-CAR and a P-CAR at the cell surface; and
(c) optionally deleting a candidate gene, said candidate gene selected from TCRA, PD1, CTLA4 or dCK.

16. The method of claim 15, wherein said immune cells are from a donor.

17. The immune cell according to claim 9, wherein the immune cell is primary immune T-cell.

18. The immune cell according to claim 10, wherein the TCR alpha or the TCR beta subunit gene is inactivated by deletion using a specific endonuclease.

19. The method according to claim 13, wherein the haematological cancer is a relapsed refractory haematological cancer.

20. The method according to claim 14, wherein the leukemia or myeloma is a relapsed and/or refractory leukemia or myeloma.
